(19) United States
(12) Patent Application Publication
(10) Pub. No.: US 2016/0340740 A1
(43) Pub. Date: Nov. 24, 2016

(54) METHYLATION HAPLOTYPING FOR NON-INVASIVE DIAGNOSIS (MONOD)

(71) Applicant: THE REGENTS OF THE UNIVERSITY OF CALIFORNIA, San Diego, CA (US)

(72) Inventor: Kun Zhang, San Diego, CA (US)

(21) Appl. No.: 15/114,803

(22) PCT Filed: Jan. 29, 2015
(86) PCT No.: PCT/US2015/013562

§ 371 Date: Jul. 27, 2016

Related U.S. Application Data
(60) Provisional application No. 61/933,750, filed on Jan. 30, 2014.

(51) Int. Cl. C12Q 1/68

(52) U.S. Cl. CPC C12Q 1/6886; C12Q 1/6883; C12Q 2600/172; C12Q 2600/154

(57) ABSTRACT

Embodiments disclosed herein provides methods for detecting the presence of a target nucleic acid in a mixture of nucleic acids comprising: performing methylation haplotype analysis on a sample comprising a plurality of nucleic acids; and determining whether said sample includes a methylation haplotype indicative of the presence said target nucleic acid. Embodiments disclosed herein provide methods for detecting tumor in a subject and prenatal detection of fetal chromosomal abnormality using the methods for detecting the presence of a target nucleic acid disclosed herein. Further disclosed are probes and kits for methylation haplotype analysis.

### INCORPORATION BY REFERENCE TO ANY PRIORITY APPLICATIONS

[0001] This application claims the benefit of priority to U.S. Provisional Application Ser. No. 61/933,750, entitled “METHYLATION HAPLOTYPING FOR NON-INVASIVE DIAGNOSIS (MONOD),” filed Jan. 30, 2014, the disclosure of which is hereby incorporated by reference herein in its entirety.

### STATEMENT REGARDING FEDERALLY SPONSORED R&D

[0002] This invention was made with government support under grant number GM097253 awarded by the National Institute of Health. The government has certain rights in the invention.

### REFERENCE TO SEQUENCE LISTING, TABLE, OR COMPUTER PROGRAM LISTING

[0003] The present application is being filed along with a Sequence Listing in electronic format. The Sequence Listing is provided as a file entitled UCSD087-001WO_Sequence_Listing.TXT, created Jan. 28, 2015, which is 2,883 Kb in size. The information in the electronic format of the Sequence Listing is incorporated herein by reference in its entirety.

### BACKGROUND

[0004] 1. Field

[0005] Embodiments described herein relate to compositions and methods for detecting the low-abundance nucleic acids at high sensitivity.

[0006] 2. Description of the Related Art

[0007] Methods and compositions for detecting low-abundance nucleic acids with high sensitivity are disclosed herein. Such methods and compositions may be used, for example, to detect trisomy 21 or the presence of cancer.

[0008] For non-invasive trisomy 21 detection, existing methods are based on either fetal specific proteins, RNA transcripts, fetal specific methylation signatures on single CpG sites at multiple genomic positions (Poon et al. 2002; Chim et al, 2008; Lun et al, 2013), or subtle elevation of chromosome 21 DNA content in maternal blood (Chiu et al. 2008; Fan et al. 2008). The latter strategy has been commercialized by multiple companies in the US, and the tests are covered by a number of insurance plans.

[0009] For non-invasive cancer detection from peripheral blood, there are no mature commercial assays in the market. Assays at various stages of development include enrichment of rare circulating cancer stem cells followed by subsequent analyses, detecting of circulating microRNAs or DNA.

### SUMMARY

[0010] Embodiments disclosed herein provides methods for detecting the presence of a target nucleic acid in a mixture of nucleic acids comprising: performing methylation haplotype analysis on a sample comprising a plurality of nucleic acids; and determining whether said sample includes a methylation haplotype indicative of the presence said target nucleic acid. In some embodiments, said methylation haplotype analysis comprises determining the combinatorial methylation status of a plurality of methylation sites in a nucleic acid molecule. In some embodiments, said plurality of methylation sites comprises at least 2, at least 3, at least 4, at least 5, at least 10, at least 20, at least 40, at least 50, at least 100, at least 200, at least 300, at least 400, at least 500 or more than 500 methylation sites indicative of the presence of the target nucleic acid in the sample. In some embodiments, said plurality of methylation sites comprises at least 2 methylation sites. In some embodiments, said plurality of methylation sites comprises at least 3 methylation sites. In some embodiments, said plurality of methylation sites comprises at least 4 methylation sites. In some embodiments, said plurality of methylation sites comprises at least 5 methylation sites. In some embodiments, said plurality of methylation sites comprises at least 10 methylation sites. In some embodiments, said plurality of methylation sites are located within a region on a single nucleic acid molecule. In some embodiments, said region is about 5 bp to about 500 bp. In some embodiments, said region is about 10 bp to about 200 bp. In some embodiments, said region is about 20 bp to about 100 bp. In some embodiments, said plurality of methylation sites are located within a region selected from the chromosomal regions listed in Table 1, Table 2 and Table 4. In some embodiments, said target nucleic acid represents a percentage of the plurality of nucleic acids contained in the sample that is about 0.1% to about 10%. In some embodiments, said target nucleic acid represents a percentage of the plurality of nucleic acids contained in the sample that is less than about 5%. In some embodiments, said target nucleic acid represents a percentage of the plurality of nucleic acids contained in the sample that is less than about 3%. In some embodiments, said target nucleic acid represents a percentage of the plurality of nucleic acids contained in the sample that is less than about 2%. In some embodiments, said target nucleic acid represents a percentage of the plurality of nucleic acids contained in the sample that is less than about 1%. In some embodiments, the methods comprise determining whether said sample includes at least 2 methylation haplotypes indicative of the presence said target nucleic acid. In some embodiments, the methods comprise determining whether said sample includes at least 3 methylation haplotypes indicative of the presence said target nucleic acid. In some embodiments, the methods comprise determining whether said sample includes at least 5 methylation haplotypes indicative of the presence said target nucleic acid. In some embodiments, the methods comprise determining whether said sample includes at least 10 methylation haplotypes indicative of the presence said target nucleic acid. In some embodiments, the methods comprise determining whether said sample includes at least 20 methylation haplotypes indicative of the presence said target nucleic acid. In some embodiments, the methods comprise enriching the plurality of nucleic acids using selector probes. In some embodiments, the methods comprise enriching the plurality of nucleic acids using MeDiP. In some embodiments, the sample comprises genomic DNA. In some embodiments, said genomic DNA is bisulfite converted. In some embodiments, said bisulfite converted genomic DNA is amplified using microdroplet PCR. In some embodiments, determining the methylation status of a plurality of methylation sites comprises contacting said plurality of nucleic acids with a plurality of probes to form hybridization complexes. In some embodiments, the methods comprise modifying said plurality of probes of said hybridization complexes to form a plurality of modified probes. In some embodiments, modifying said plurality of probes comprises extending and/or ligating said plurality of probes. In some embodiments, each of said plurality of probes comprises a target-specific domain. In some embodiments, the methods comprise amplifying said plurality of modified probes. In some embodiments, each of said plurality of modified probes comprises a unique molecule identifier (UMI). In some embodiments, each of said plurality of modified probes comprises a primer complementary domain. In some embodiments, each of said plurality of modified probes comprises two primer complementary domains. In some embodiments, said plurality of probes are padlock probes. In some embodiments, said padlock probes comprise two target-specific domains and a linker sequence. In some embodiments, said padlock probes comprise sequences selected from the group consisting of SEQ ID NOs: 1-7,109. In some embodiments, the methods comprise sequencing said plurality of probes of said hybridization complexes. In some embodiments, the methods comprise size-selection of said plurality of nucleic acids. In some embodiments, the selected plurality of nucleic acids have a length of about 50 bp to about 200 bp. In some embodiments, the selected plurality of nucleic acids have a length of at least about 200 bp. In some embodiments, the methods comprise determining the methylation haplotype of the selected plurality of nucleic acids having different sizes. In some embodiments, the methods comprise comparing the methylation haplotype of the selected plurality of nucleic acids having different sizes. In some embodiments, the sample is a plasma sample. In some embodiments, the target nucleic acid is a nucleic acid associated with cancer. In some embodiments, the target nucleic acid is indicative of chromosomal abnormality. In some embodiments, the target nucleic acid is indicative of trisomy 21. In some embodiments, said methylation haplotype analysis comprises determining the methylation status of a plurality of methylation sites which are in linkage disequilibrium with one another.

[0011] Embodiments disclosed herein provide methods for detecting tumor in a subject, comprising: detecting the presence of one or more target nucleic acids in a sample comprising a plurality of nucleic acids from said subject using the methods disclosed herein, wherein the presence of said one or more target nucleic acids is indicative of the presence of tumor in said subject. In some embodiments, said sample is a plasma sample isolated from peripheral blood of said subject. In some embodiments, the methods comprise detecting the presence of at least 2 target nucleic acids in a sample comprising a plurality of nucleic acids. In some embodiments, the methods comprise detecting the presence of at least 5 target nucleic acids in a sample comprising a plurality of nucleic acids. In some embodiments, the methods comprise detecting the presence of at least 10 target nucleic acids in a sample comprising a plurality of nucleic acids. In some embodiments, the methods comprise detecting the presence of at least 100 target nucleic acids in a sample comprising a plurality of nucleic acids. In some embodiments, each of said one or more target nucleic acids comprises one or more methylation haplotypes that are tumor cell-indicative. In some embodiments, said one or more target nucleic acids are selected from the group consisting of the chromosomal regions listed in Table 1 and Table 4.

[0012] Embodiments disclosed herein provide methods for prenatal detection of fetal chromosomal abnormality, comprising: detecting the presence of two or more target nucleic acids in a sample comprising a plurality of nucleic acids from said subject using the methods disclosed herein; calculating the amount of said two or more target nucleic acids; and determining the presence or absence of fetal chromosomal abnormality by comparing the amount of said two or more target nucleic acids. In some embodiments, said sample is a plasma sample isolated from peripheral blood of a pregnant woman. In some embodiments, the methods comprise detecting the presence of at least 5 target nucleic acids in a sample comprising a plurality of nucleic acids. In some embodiments, the methods comprise detecting the presence of at least 10 target nucleic acids in a sample comprising a plurality of nucleic acids. In some embodiments, the methods comprise detecting the presence of at least 100 target nucleic acids in a sample comprising a plurality of nucleic acids. In some embodiments, the methods comprise detecting the presence of at least 1,000 target nucleic acids in a sample comprising a plurality of nucleic acids. In some embodiments, the methods comprise detecting the presence of at least 10,000 target nucleic acids in a sample comprising a plurality of nucleic acids. In some embodiments, each of said two or more target nucleic acids comprises one or more methylation haplotypes that are fetal cell-indicative. In some embodiments, said fetal chromosomal abnormality is trisomy 21 (Down syndrome), trisomy 18 (Edwards syndrome), trisomy 22 (cat eye syndrome), trisomy 13 (Patau syndrome), XO, XXX, XYY, XXY, or a combination thereof. In some embodiments, the methods comprise calculating the copy number of a chromosome. In some embodiments, the methods comprise comparing the copy number of a chromosome with a reference copy number. In some embodiments, said one or more target nucleic acids are selected from the group consisting of the chromosomal regions listed in Table 2.

[0013] Embodiments disclosed herein provide probes for methylation haplotype analysis, comprising: a first target-specific domain that hybridizes to a first location on a target nucleic acid; a primer-complementary domain; a linker sequence; a unique molecule identifier (UMI); and a second target-specific domain that hybridizes to a second location on said target nucleic acid, wherein said first target-specific domain and said second target-specific domain hybridize to adjacent sequences on a target nucleic acid. In some embodiments, said target nucleic acid is selected from the group consisting of the chromosomal locations listed in Tables 1-4. In some embodiments, said probe comprises a sequence selected from the group consisting of SEQ ID NOs: 1-7,109.

[0014] Embodiments disclosed herein provide kits for methylation haplotype analysis comprising a plurality of probes for methylation haplotype analysis, comprising: a first target-specific domain that hybridizes to a first location on a target nucleic acid; a primer-complementary domain; a linker sequence; a unique molecule identifier (UMI); and a second target-specific domain that hybridizes to a second location on said target nucleic acid, wherein said first target-specific domain and said second target-specific domain hybridize to adjacent sequences on a target nucleic acid. In some embodiments, said plurality of probes hybridizes to at least 5 nucleic acids. In some embodiments, said plurality of probes hybridizes to at least 10 nucleic acids. In some embodiments, said plurality of probes hybridizes to at least 50 nucleic acids. In some embodiments, said plurality of probes hybridizes to at least 100 nucleic acids. In some embodiments, said plurality of probes hybridizes to at least 500 nucleic acids.

[0015] Embodiments disclosed herein provide methods for identifying a methylation haplotype that is indicative of a tissue type, comprising: determining the methylation status of a plurality of methylation sites in a sample from said tissue type comprising a plurality of nucleic acids; comparing said methylation status of said plurality of methylation sites to the methylation status of said plurality of methylation sites on a reference sample; and identifying a methylation haplotype that is indicative of said tissue type.

[0016] Embodiments disclosed herein further provide methods of performing methylation haplotype analysis on a nucleic acid, comprising: determining the methylation status of a plurality of methylation sites on said nucleic acid, wherein said plurality of methylation sites are located on a chromosomal region.

### BRIEF DESCRIPTION OF THE DRAWINGS

[0017] FIG. 1 illustrates sensitive detection and quantification of circulating placenta or tumor DNA in blood plasma using DNA methylation haplotypes. Each line represents a single DNA molecule, and each circle is a CpG site. Open circle is unmethylated CpG and solid circle is methylated CpG.

[0018] FIG. 2 illustrates differential haplotype analysis by fragment size. Targeted capture and sequencing of long and short fragments improve sensitivity by subtraction.

[0019] FIGS. 3A and 3B illustrate multiplex capture of MONOD marker panel with umi-BSPP. FIG. 3A shows: each umi-BSPP probe contains a randomized unique molecule identifier (UMI) for uniquely labelling the capture product from each template DNA molecule. FIG. 3B shows: bisulfite converted DNA from clinical specimens is converted into sequencing libraries with 5 steps in single-tube reactions.

[0020] FIGS. 4A and 4B illustrate deriving methylation haplotypes from sequencing data. FIG. 4A shows: the bam2hapInfo program takes mapped raw sequencing data in the bam format, and reports haplotypes and their counts in hapInfo files. FIG. 4B shows: an example on deriving 4-locus methylation haplotypes from raw sequencing reads.

[0021] FIG. 5 shows quantitative detection of cancer DNA in whole blood. Top panel: level of cancer DNA detected in mixture of cancer and blood DNA at various ratios. Bottom panel: statistical significance of detection.

[0022] FIG. 6 shows detection of cancer specific aneuploidy on chromosome 21 (top panel) and chromosome 18 (bottom panel).

[0023] FIG. 7 shows tumor-specific haplotypes detected in the plasma of four cancer patients. Each row represents a methylation haplotype derived from a unique DNA molecule in the sample. Each column is the genomic position of a CpG site. The methylation status of a CpG site in each haplotype is represented as a square. Black is methylated, white is unmethylated and light blue is missing value.

### DETAILED DESCRIPTION OF THE PREFERRED EMBODIMENT

### Definitions

[0024] All patents, applications, published applications and other publications referred to herein are incorporated herein by reference to the referenced material and in their entireties. If a term or phrase is used herein in a way that is contrary to or otherwise inconsistent with a definition set forth in the patents, applications, published applications and other publications that are herein incorporated by reference, the use herein prevails over the definition that is incorporated herein by reference.

[0025] As used herein, the singular forms “a”, “an”, and “the” include plural references unless indicated otherwise, expressly or by context. For example, “a” dimer includes one or more dimers, unless indicated otherwise, expressly or by context.

[0026] The term “methylation haplotype” refers to the combination of methylation status at two or more methylation sites of a single nucleic acid molecule. As used herein, a methylation haplotype is indicative of a tissue sample, such as a tumor cell, a fetal cell, etc. In some embodiments, the methylation status at all the methylation sties of a methylation haplotype shows linkage disequilibrium. Therefore, detecting the methylation status of one methylation site may be sufficient to detect the methylation haplotype. A “methylation site,” also called a “site” or a “locus,” as used herein refers to a CpG site, but could also refer to other methylation sites, such as CHG, CHH, etc. A methylation haplotype may include the methylation status of at least 2, at least 3, at least 4, at least 5, at least 6, at least 10, at least 20, at least 40, at least 50, at least 100, at least 200, at least 300, at least 400, at least 500 or more than 500, or a range between two of any of the above values, methylation sites. The spacing between two adjacent methylation sites can be anywhere between one to hundreds of bases. The chromosomal region that covers all the methylation sites of a methylation haplotype is referred to as a “marker region,” which may vary in length. For example, a marker region may have a length that is, is about, is less than, or is more than, 4 nucleotides (nt), 5 nt, 6 nt, 7 nt, 8 nt, 9 nt, 10 nt, 20 nt, 30 nt, 40 nt, 50 nt, 60 nt, 70 nt, 80 nt, 90 nt, 100 nt, 150 nt, 200 nt, 300 nt, 400 nt, 500 nt, 1,000 nt, etc., or a range between two of any of the above values, e.g., about 5 nt to about 20 nt, about 50 nt to about 100 nt, etc.

[0027] The term “chromosomal abnormality” refers to a deviation between the structure of the subject chromosome and a normal homologous chromosome. The term “normal” refers to the predominate karyotype or banding pattern found in healthy individuals of a particular species. A chromosomal abnormality can be numerical or structural, and includes but is not limited to aneuploidy, polyploidy, inversion, a trisomy, a monosomy, duplication, deletion, deletion of a part of a chromosome, addition, addition of a part of chromosome, insertion, a fragment of a chromosome, a region of a chromosome, chromosomal rearrangement, and translocation. A chromosomal abnormality can be correlated with presence of a pathological condition or with a predisposition to develop a pathological condition.

[0028] Monosomy X (XO, absence of an entire X chromosome) is the most common type of Turner syndrome, occurring in 1 in 2500 to 1 in 3000 live-born girls (Sybert and McCauley (2004) N Engl J Med 351:1227-1238). XXY syndrome is a condition in which human males have an extra X chromosome, existing in roughly 1 out of every 1000 males (Bock, Understanding Klinefelter Syndrome: A Guide for XXY Males and Their Families. NIH Pub. No. 93-3202 (1993)). XYY syndrome is an aneuploidy of the sex chromosomes in which a human male receives an extra Y chromosome, giving a total of 47 chromosomes instead of the more usual 46, affecting 1 in 1000 male births while potentially leading to male infertility (Aksglaede et al., (2008) J Clin Endocrinol Metab 93:169-176).

[0029] Turner syndrome encompasses several conditions, of which monosomy X (XO, absence of an entire sex chromosome, the Barr body) is most common. Typical females have two X chromosomes, but in Turner syndrome, one of those sex chromosomes is missing. Occurring in 1 in 2000 to 1 in 5000 phenotypic females, the syndrome manifests itself in a number of ways. Klinefelter's syndrome is a condition in which human males have an extra X chromosome. In humans, Klinefelter's syndrome is the most common sex chromosome disorder and the second most common condition caused by the presence of extra chromosomes. The condition exists in roughly 1 out of every 1,000 males. XYY syndrome is an aneuploidy of the sex chromosomes in which a human male receives an extra Y chromosome, giving a total of 47 chromosomes instead of the more usual 46. This produces a 47, XYY karyotype. This condition is usually asymptomatic and affects 1 in 1000 male births while potentially leading to male infertility.

[0030] Trisomy 13 (Patau syndrome), trisomy 18 (Edward syndrome) and trisomy 21 (Down syndrome) are the most clinically important autosomal trisomies and how to detect them has always been the hot topic. Detection of above fetal chromosomal aberration has great significance in prenatal diagnosis (Ostler, Diseases of the eye and skin: a color atlas. Lippincott Williams & Wilkins. pp. 72. ISBN 9780781749992 (2004); Driscoll and Gross (2009) N Engl J Med 360: 2556-2562; Kagan et al., (2008) Human Reproduction 23:1968-1975).

[0031] It is understood that aspects and embodiments of the invention described herein include “consisting” and/or “consisting essentially of” aspects and embodiments.

[0032] Other objects, advantages and features of the present invention will become apparent from the following specification taken in conjunction with the accompanying drawings.

### Methods for Detecting a Target Nucleic Acid

[0033] In this disclosure, methods and compositions for digital quantification of methylation haplotypes, and the uses thereof to detect low abundance nucleic acids, are provided. To detect and quantify low abundance nucleic acids, such as tumor DNA or fetal DNA, marker regions in the genome in which there are major differences in methylation status between normal cells, such as normal cells in peripheral blood or other samples, and other cells of interest (such as cancer or fetal cells) are analyzed. These are the marker regions used for methylation status analysis. For example, a marker region containing 6 CpG sites might be completely unmethylated in whole blood, and fully methylated in placenta. If a maternal whole blood sample contains 3% of fetal DNA, then a 3% methylation level can be detected with an ideal assay. However, all methylation assays have technical errors, such as incomplete bisulfate conversion, incomplete enzyme digestion, and/or sequencing errors. Typically all the technical errors combined can contribute to ˜1-2%. With the presence of these errors, a 3% methylation level cannot be confidently detected using an individual methylation site. Such technical errors greatly compromise the sensitivity and confidence in detecting and quantifying fetal DNA molecules. Methylation haplotyping analysis can dramatically improve the discriminating power by minimizing the effect of the technical errors. In this case, for example, the 3% fetal DNA molecules are fully (or almost fully) methylated at all CpG sites in a marker region, whereas the maternal DNA molecules are not methylated in this marker region. In other words, the methylation status at multiple CpG sites in a marker region on the same nucleic acid are all linked. Using a methylation haplotype comprising four or more CpG sites, one can confidently identify rare DNA molecules that are present at a percentage of 0.01% or even lower, at least two orders of magnitude below the technical errors (1-2% per site) for a single site. An analytical framework for methylation haplotype and linkage disequilibrium analysis has been developed (Shoemaker et al, 2009). In addition, combining information from multiple marker regions will further improve the sensitivity and robustness in the presence of biological variability. Without being bound by a theory, cell-free DNA typically comes from apoptotic cells, and is in short fragments (Chan et al. 2004). In contrast, whole blood DNA typically has larger sizes (at least kilobases) even after DNA extraction. Analysis of methylation haplotypes from DNA molecules of different sizes adds another level of stringency in detecting rare target nucleic acid molecules.

[0034] In some embodiments, methylation haplotypes (as opposed to individual CpG sites) are used to improve detection sensitivity and reduce technical noise for detecting low abundance species in mixed DNA samples. A methylation haplotype is the combinatorial (or linked) methylation status of multiple methylation sites (also called “sites” or “loci”) in a single DNA molecule. Multi-locus haplotypes are robust with the presence of random technical errors on individual loci, and hence provide a much greater power in distinguishing true signatures at a low abundance from technical errors. As used herein, a methylation haplotype is indicative of a tissue sample, such as a tumor cell, a fetal cell, etc.

[0035] The methods and compositions described herein allow the deconvolution of mixed nucleic acid samples, such as DNA samples, based on the detection of low-abundance nucleic acids at extremely high sensitivity. In some embodiments, the low-abundance nucleic acids may be from a particular tissue or cell type, such as a fetal cell or cancer cell. In some embodiments, methylation haplotypes in a set of marker regions in the genome are used. For example, the methylation haplotype may include at least 5, at least 10, at least 20, at least 40, at least 50, at least 100, at least 200, at least 300, at least 400, at least 500 or more than 500 methylation sites indicative of the presence of the target nucleic acid in the sample. In some embodiments, the methods and compositions disclosed herein may be used to separate and detect rare nucleic acids, for example low abundance DNA in a mixture of DNA, based on methylation haplotypes or epigenetic modifications (cytosine methylation) on multiple CpG sites of single DNA molecules. In some embodiments, high detection sensitivity is provided, which translates to detection at earlier time point. In some embodiments, standard short-read sequencing platforms may be used. In some embodiments, the disclosed methods and compositions provide lower assay cost compared to the other existing methods.

[0036] In some embodiments, the methods and compositions disclosed herein provide ultra-high sensitivity for detecting a rare target nucleic acid species from a sample comprising a plurality of nucleic acids (such as peripheral blood DNA) using some combinations of the three concepts: (i) multi-locus methylation haplotype analysis (FIG. 1); (ii) integrative analysis of multiple marker regions; and (iii) differential haplotype analysis of DNA fragments with different sizes (FIG. 2). Embodiments disclosed herein are capable of detecting the presence of a target nucleic acid that represents a small fraction of a plurality of nucleic acids contained in a sample. For example, in some embodiments, the target nucleic acid may represent a percentage of the plurality of nucleic acids that is, is about, is less than, 0.1%, 0.2%, 0.3%, 0.4%, 0.5%, 0.6%, 0.7%, 0.8%, 0.9%, 1%, 2%, 3%, 4%, 5%, 6%, 7%, 8%, 9%, 10%, or a range between two of any of the above values, e.g., about 0.1% to about 2%, about 1% to about 3%, etc. In some embodiments, the target nucleic acid may represent a percentage of the plurality of nucleic acids that is less than about 5%. In some embodiments, the target nucleic acid may represent a percentage of the plurality of nucleic acids that is less than about 3%. In some embodiments, the target nucleic acid may represent a percentage of the plurality of nucleic acids that is less than about 2%. In some embodiments, the target nucleic acid may represent a percentage of the plurality of nucleic acids that is less than about 1%. In some embodiments, the methods and compositions disclosed herein can be implemented as genetic screening or diagnostic tests for non-invasive prenatal diagnosis, non-invasive monitoring of tumor loads in cancer patients after treatments, or early-stage cancer detection.

[0037] In some embodiments, a nucleic acid sample includes a double-stranded nucleic acid. In some embodiments, a nucleic acid sample includes genomic DNA, or cDNA. In some embodiments, mitochondrial or chloroplast DNA is used. In some embodiments, a nucleic acid sample includes RNA or derivatives thereof such as mRNA or cDNA. Some embodiments described herein can utilize a plurality of different nucleic acid species (e.g., nucleic acid molecules having different nucleotide sequences being present in the plurality).

[0038] In some embodiments, two or more methylation haplotypes may be determined that are indicative of the presence of a target nucleic acid, or a plurality of target nucleic acids. For example, at least 2, at least 3, at least 5, at least 10, at least 20, or a range between two of any of the above values, methylation haplotypes may be determined that are indicative of the presence of a target nucleic acid. The chromosomal location of the two or more methylation haplotypes may vary. For example, the two or more methylation haplotypes may be located on the same or different chromosomes. In some embodiments, wherein the plurality of target nucleic acids are located on the same chromosome, two or more methylation haplotypes located on the same chromosome may be determined. In some embodiments, the plurality of nucleic acids from the sample may be subject to size-selection before methylation status analysis. For example, in some embodiments, the plurality of nucleic acids may have a size that is, is about, is at least, is at most, 20 bp, 30 bp, 40 bp, 50 bp, 60 bp, 70 bp, 80 bp, 90 bp, 100 bp, 150 bp, 200 bp, 300 bp, 400 bp, 500 bp, or a range between two of any of the above values, e.g., about 50 bp to about 200 bp, about 100 bp to about 250 bp, etc. In some embodiments, the methylation haplotype of the selected plurality of nucleic acids having different sizes are determined. In some embodiments, the methylation haplotype of the selected plurality of nucleic acids having different sizes are compared. Integrating methylation haplotypes from multiple chromosomal locations, and differential methylation haplotype analysis of DNA fragments with different sizes further increases the sensitivity of the methods of detection. A higher sensitivity translates to robust detection at earlier time points and/or lower assay costs.

### Analysis of Methylation Status

[0039] In some embodiments of the methods and compositions described herein, methylation haplotypes, or epigenetic modifications (cytosine methylation) on multiple methylation sites of single nucleic acid molecules are analyzed by determining the methylation status of the methylation sites covered by the methylation haplotype. As used herein, “methylation status” refers to methylation or unmethylation of a cytosine residue, for example, in a CpG dinucleotide, or in other contexts, e.g., CHG, CHH, etc. Methylated cytosine may be a variety of forms, for example, 5-methylcytosine (5mC), 5-hydroxymethylcytosine (5hmC), 5-formylcytosine (5fC) and 5-carboxycytosine (5caC), etc. A variety of protocols are available for the analysis of methylation status, with or without target enrichment (reviewed in Plongthongkum et al. 2014). For example, reduced representation bisulphite sequencing (RRBS), methylation restriction enzyme sequencing (MRE-seq), methylation DNA immunoprecipitation sequencing (MeDIP-seq, Papageorgiou et al. 2010), methyl-CpG-binding domain protein sequencing (MBD-seq), methylation DNA capture sequencing (MethylCap-seq), etc. In some embodiments, methylation status can be obtained by the standard short-read sequencing platforms, such as Illumina's HiSeq/MiSeq or LifeTech's Ion Proton, as part of the methylation assay without extra efforts and cost. In some embodiments, the methylation status may be analyzed using a target methylation sequencing technology (e.g., Bisulfite Padlock Probes, or BSPP, Deng et al, 2008; Diep et al. 2012).

[0040] In some embodiments, the target nucleic acids may be enriched before the methylation status analysis. For example, micro-droplet PCR (Komori et al. 2011) or Selector probes (Johansson et al. 2011) can be used with some differences in the requirement of input materials and/or cost. Accordingly, each of the foregoing approaches may be utilized in some embodiments of the methods and compositions described herein.

[0041] In preferred embodiments, the methylation status analysis methods disclosed herein take the bisulfite sequencing reads (single-ends or paired-ends) as the input.

[0042] Further provided are methods of performing methylation haplotype analysis on a nucleic acid, comprising: determining the methylation status of a plurality of methylation sites on the nucleic acid, wherein said plurality of methylation sites are located on a marker region. Using the results from methylation status analysis, methylation haplotypes and their abundance from the raw sequencing reads are derived. For sample preparation methods that allow identifying multiple clonal sequencing reads originated from the same template DNA molecules (such as umi-RRBS, or hybridization-based target capture), the consensus methylation haplotypes may be derived from the clonal reads to improve the accuracy and avoid over-dispersion of methylation haplotype counts. The probability that a methylation haplotype is present in a sample (or a pool of samples) is determined by the frequency the exact methylation haplotype is observed, or estimated from the methylation levels of individual CpG sites and the technical error rates (sequencing errors, bisulfite conversion errors) assuming no linkage between adjacent sites (or P(M1M2)=P(M1)*P(M2) where M1M2 is the probability of two-locus methylated haplotype, P(M1) and P(M2) are the mean methylation level at the two loci in the cell population or tissue).

[0043] Therefore, further provided are methods for identifying a methylation haplotype that is indicative of a tissue type, comprising: determining the methylation status of a plurality of methylation sites on a sample from said tissue type comprising a plurality of nucleic acids; comparing said methylation status of said plurality of methylation sites to the methylation status of said plurality of methylation sites on a reference sample; and identifying a methylation haplotype that is indicative of said tissue type. Preferably, the plurality of methylation sites are located in the same chromosomal location, or a marker region. Methylation haplotypes that are indicative of a tissue type, such as tumor cell or fetal cell, may be identified where a plurality of methylation sites show linkage disequilibrium between the tissue type and a reference tissue type, such as normal blood cells. For example, for each methylation haplotype from a plasma sample of a subject having tumor, the likelihoods of it originating from the pooled tumor primary biopsies data and from the pooled normal plasma data are determined, and calculated the negative log likelihood ratio. In some embodiments, a methylation haplotype is classified as indicative of a tissue type when the negative log likelihood ratio is, is about, is at least 2.0, 2.1, 2.2, 2.3, 2.4, 2.5, 2.6, 2.7, 2.8, 2.9, 3.0, 3.1, 3.2, 3.3, 3.4, 3.5, 3.6, 3.7, 3.8, 3.9, 4.0, 5.0, or a range between two of any of the above values, e.g., about 2.0 to about 4.0, about 3.0 to about 5.0, etc. A methylation haplotype may include the methylation status of at least 2, at least 3, at least 4, at least 5, at least 6, at least 10, at least 20, at least 40, at least 50, at least 100, at least 200, at least 300, at least 400, at least 500 or more than 500, or a range between two of any of the above values, methylation sites. In some embodiments, methylation haplotypes that contain four or more methylation sites are preferred.

### Methods of Clinical Diagnosis

[0044] The disclosed methods and compositions can be used in a number of contexts, such as clinical diagnostic tests. For example, the disclosed methods and compositions may be used in non-invasive methods for detection of fetal chromosomal abnormality, e.g., trisomy 21, by analyzing fetal DNA in maternal whole blood at a very early stage of pregnancy, or non-invasive detection of circulating tumor cell-indicative DNA in patient's whole blood. Human peripheral blood contains low levels of DNA molecules from other tissues or cell types, such as circulating cancer stem cells or cell-free DNA from apoptotic cancer cells in cancer patients, or fetal DNA in pregnant women.

[0045] Therefore, some embodiments disclosed herein provide methods for detecting tumor in a subject, comprising: detecting the presence of one or more target nucleic acids in a sample comprising a plurality of nucleic acids from said subject using the methods and compositions disclosed herein, wherein the presence of said one or more target nucleic acids is indicative of the presence of tumor in said subject. The number of target nucleic acids detected may vary according to the specific needs of a particular tumor and/or subject. For example, in some embodiments, the number of target nucleic acids detected is, is about, is less than, is more than, 2, 3, 4, 5, 6, 7, 8, 9, 10, 20, 50, 100, 1,000, 10,000, or a range between any two of the above values, e.g., about 2 to about 10, about 5 to about 100, etc. In some embodiments, the number of target nucleic acids detected is at least 2. In some embodiments, the number of target nucleic acids detected is at least 5. In some embodiments, the number of target nucleic acids detected is at least 10. In some embodiments, the number of target nucleic acids detected is at least 100. In preferred embodiments, each of the target nucleic acids comprises one or more methylation haplotypes that are tumor cell-indicative.

[0046] In some embodiments, the methods and compositions disclosed herein provide high-sensitivity detection and are simple to utilize.

[0047] Haplotypes have been used for fetal genome sequencing from maternal blood (Kitzman et al. 2012; Fan et al., 2012). However, these methods focus on genetic variants and long-range haplotypes of genetic variants. Such haplotypes have to be determined by additional methods, such as clone-based haplotyping, or single chromosome isolation and sequencing.

[0048] Therefore, some embodiments disclosed herein provide methods for prenatal detection of fetal chromosomal abnormality, comprising: detecting the presence of one or more target nucleic acids in a sample comprising a plurality of nucleic acids from said subject using the methods and compositions disclosed herein; and determining the presence or absence of fetal chromosomal abnormality by comparing the level of said one or more target nucleic acids to a reference level. The number of target nucleic acids detected may vary according to the specific needs of a particular tumor and/or subject. For example, in some embodiments, the number of target nucleic acids detected is, is about, is less than, is more than, 2, 3, 4, 5, 6, 7, 8, 9, 10, 20, 50, 100, 1,000, 10,000, or a range between any two of the above values, e.g., about 10 to about 10, about 100 to about 1,000, etc. In some embodiments, the number of target nucleic acids detected is at least 2. In some embodiments, the number of target nucleic acids detected is at least 5. In some embodiments, the number of target nucleic acids detected is at least 10. In some embodiments, the number of target nucleic acids detected is at least 100. In some embodiments, the number of target nucleic acids detected is at least 1,000. In some embodiments, the number of target nucleic acids detected is at least 10,000. In preferred embodiments, each of the target nucleic acids comprises one or more methylation haplotypes that are fetal cell-indicative.

[0049] In some embodiments, the methods and compositions described herein allow separation of fetal DNA from maternal DNA in a sample, such as peripheral blood sample, from a pregnant woman, based on methylation haplotypes for copy number estimation. This may lead to a higher detection sensitivity and a lower assay cost.

[0050] In one embodiment, the sample contains both maternal DNA and fetal DNA. In another embodiment, the sample is obtained from peripheral blood of a pregnant female. Blood may be collected using any standard technique for blood drawing including but not limited to venipuncture. For example, blood can be drawn from a vein from the inside of the elbow or the back of the hand. Blood samples can be collected from a pregnant female at any time during fetal gestation. For example, blood samples can be collected from human females at about or before 4, 5, 6, 7, 8, 9, 10, 11, 12, 16, 20, 24, 28, 32, 36, 40, weeks of fetal gestation, or a time between two of any of the above time points, and preferably between 8-28 weeks of fetal gestation.

### Probes for Methylation Haplotype Analysis

[0051] Embodiments disclosed herein further provide probes for methylation haplotype analysis, comprising: a first target-specific domain that hybridizes to a first location on a target nucleic acid; a primer-commentary domain; a linker sequence; a unique molecule identifier (UMI); and a second target-specific domain that hybridizes to a second location on said target nucleic acid, wherein said first target-specific domain and said second target-specific domain hybridize to adjacent sequences on a target nucleic acid. In some embodiments, the target nucleic acid is selected from the group consisting of the chromosomal locations listed in Table 1 and Table 2. In some embodiments, the probe comprises a sequence selected from the group consisting of SEQ ID NOs: 1-7,109.

[0052] In some embodiments, provided herein are methods for constructing a sequencing library using a plurality of the probes disclosed herein. Nucleic acid molecules, preferably genomic DNA, may be purified from a sample using a protocol that preserves the methylation status of the nucleic acids. Subsequently, the purified nucleic acid, e.g., genomic DNA, is bisulfite converted. In some embodiments, sodium bisulfite treatment may be used to convert unmethylated cytosine into uracil, which is replaced by thymine after amplification (e.g., PCR), while 5-methylcytosine remains unchanged. As outlined herein, there are a variety of bisulfite conversion kits available. For example, use of the Zymo EZ DNA Methylation-Lightning Kit (Zymo Research, Irvine, Calif.) bisulfite conversion protocol is sufficient for conversion of >98% of the non-methylated cytosines. In some embodiments, the purified genomic DNA may be subject to fragmentation, for example, by sonication, endonuclease digestion, etc.

[0053] The library construction protocol may also include a fragment size selection step. For example, the fragment size selection step may be a bead-based protocol that is used to select fragments within a desired base pair range. In some embodiments, SPRIselect beads (Beckman Coulter) may be used to select fragments in a certain base pair range. In some embodiments, Agencourt AmPure® XP system (Beckman Coulter) may be used to select fragments in a certain base pair range.

[0054] In some embodiments, the methods comprise contacting a plurality of nucleic acids with a plurality of probes to form hybridization complexes. The first target specific domain and the second target-specific domain of the probe may hybridize to a marker region that covers a methylation haplotype. In preferred embodiments, the target-specific domains hybridize to sequences of the marker region that are not modified by methylation, but are adjacent to all or some of the methylation sties of the methylation haplotype.

[0055] The hybridized probes may be modified, for example, by extension and/or ligation, to form a circularized probe. After digestion of the single-stranded nucleic acids, the circularized probes may be amplified with a primer that anneals to the primer-complementary domain. In some embodiments, the amplification enzyme, e.g., DNA polymerase, may be capable of strand displacement. In some embodiments, a DNA polymerase without strand displacement activity may be used to generate a linearized nucleic acid molecule. The linearized nucleic acid molecule may be further amplified by PCR. Accordingly, in some embodiments, the probe may comprise a second primer-complementary domain. The primer may include a variety of tags and/or adaptors, such as sequencing adaptor, sample tag or barcode, etc.

### Kits

[0056] Embodiments disclosed herein further provide kits for methylation haplotype analysis comprising a plurality of probes for methylation haplotype analysis, comprising: a first target-specific domain that hybridizes to a first location on a target nucleic acid; a primer-commentary domain; a linker sequence; a unique molecule identifier (UMI); and a second target-specific domain that hybridizes to a second location on said target nucleic acid, wherein said first target-specific domain and said second target-specific domain hybridize to adjacent sequences on a target nucleic acid.

### EXAMPLES

[0057] The following examples are offered to illustrate but not to limit the invention.

[0058] In order to facilitate understanding, the specific embodiments are provided to help interpret the technical proposal, that is, these embodiments are only for illustrative purposes, but not in any way to limit the scope of the invention. Unless otherwise specified, embodiments do not indicate the specific conditions, are in accordance with the conventional conditions or the manufacturer's recommended conditions.

### Example 1

### Bisulfite Conversion

[0059] For tumor genomic DNA, bisulfite conversion was carried out on 500 ng input genomic DNA using EZ-96 DNA Methylation Lightening MagPrep (Zymo Research) following the protocol from manufacturer. Bisulfite converted DNA was measured with Qubit ssDNA assay, and recovery rate was calculated.

[0060] For plasma DNA(10-50 ng), WGBS libraries were made by first performing end-repair and T-tailing using KAPA Hyper Prep kit, and the resulted DNA fragments were ligated with Illumina methylated TruSeq adaptors, followed with bisulfite conversion using the Zymo EZ DNA Methylation Lightning kit. The bisulfite converted DNA were PCR amplified with 11-12 cycles using the PfuTurbo Cx polymerase, and purified with AMPure beads (Beckman Coulter).

### Example 2

### BSPP Capture

[0061] Approximately 150 ng of bisulfite treated DNA or WGBS library was mixed with pooled probes at 1:200 molar ratio in 1× AmpLigase buffer (Epicentre) in total volume 20 ul in 0.2 mL 8-tube strip. The reaction mixture was overlaid with 40 ul mineral oil to prevent evaporation during padlock probe capture. The reaction mixture was incubated on thermocycler with the following thermocyling program; 95 C for 30 s, cool down to 54 C at 0.02 C/s, hold at 55 C for 20 hr. 2 ul of SLN solution mix was added to the capture reaction (KLN: 2 U/ul NEB Hemo KlenTaq, 0.5 U/ul AmpLigase (Epicentre); 100 uM dNTP, 1× AmpLigase buffer) and continued to incubate at 55 C for 20 hr to fill the gap between the capturing arms and to ligate resulting in circularized DNA. The enzyme was inactivated in the previous step by heating at 94 C for 2 min. Bisulfite converted DNA and free BSPP in the mixture was removed by adding 1 ul each of Exonuclease I (Epicentre) and Exonuclease III (Epicentre) and incubated at 37 C for 2 hr. Exonuclease enzymes was heat inactivated at 94 C for 5 min and stored captured DNA at 4 C or performed amplification immediately.

### Example 3

### Amplification and Sequencing Library Construction

[0062] Captured DNA was amplified in small volume to monitor the number of cycle to amplify and verify if the capture work. 2.5 ul of circularized DNA was added to 1× KAPA SYBR Fast qPCR Master Mix with 200 nM each of AmpF6.4.Sol and AmpR6.3.Index primers in total volume 25 ul and incubated the reaction at 98° C. for 30 s, 8 cycles of 98° C. for 10 s, 58° C. for 20, 72° C. for 20 s, 15 cycles of 98° C. for 10 s, 72° C. for 20, and 72° C. for 3 min. PCR product was purified with 0.8 volume of AMPure beads (Beckman Coulter) following the protocol provided by manufacturer and eluted with 30 ul TE buffer. 3 ul of amplified amplicons was verified in 6% TBE gel. The optimal cycle number and the right expected amplicon size were obtained, and used to perform PCR in larger volume. The rest of captured DNA was amplified by adding 10 ul of circularized DNA in total 50 ul reaction with 200 nM each of AmpF6.4.Sol and AmpR6.3.Index primer, 1×KAPA SYBR Fast qPCR Master Mix in duplicates, and incubated on thermocycler as the thermocycling program above. 100 ul of PCR product was pooled, purified with 0.8 volume of AMPure bead, eluted with 60 ul EB buffer, and verified 3 ul in 6% TBE gel. The concentration of each library was determined by PAGE quantification. Each library in the same pool was combined with equimolar ratio and PAGE-size selected by cutting the smear between 475 bp-500 bp. Sequencing libraries were resuspended with approximately 20 ul H₂O and performed qPCR to quantified concentration of the pooled libraries. The libraries were run in Illumina MiSeq run (PE, 250 bp+6 bp+250 bp) with SolSeq6.3.3 (Read1), SolSeqV6.3.2r (Read2), and AmpR6.3IndSeq(IndexRead) primers.

| Primer name | Primer sequences |
|---|---|
| pAP1V61U | 5′-G*G*G*TCATATCGGTCACTGTU-3′ |
| AP2V6 | 5′-/5Phos/CACGGGTAGTGTGTATCCTG-3′ |
| pAP1V41U | 5′-G*T*AGACTGGAAGAGCACTGTU-3′ |
| AP2V4 | 5′-/Phos/TAGCCTCATGCGTATCCGAT-3′ |
| RE-DpnII-V6 | 5′-GTGTATCCTGATC-3′ |
| RE-DpnII-V4 | 5′-ATGCGTATCCGATC-3′ |
| AmpF6.4Sol | 5′-AATGATACGGCGACCACCGAGATCTACACCACTCTCAGATGTTA |
| | TCGAGGTCCGAC-3′ |
| AmpR6.3.Index | 5′-CAAGCAGAAGACGGCATACGAGATXXXXXXGCTAGGAACGATGA |
| | GCCTCCAAC-3′ |
| SolSeq6.3.3 (Read1) | 5′-TACACCACTCTCAGATGTTATCGAGGTCCGAC-3′ |
| SolSeqV6.3.2r(Read2) | 5′-GCTAGGAACGATGAGCCTCCAAC-3′ |
| AmpR6.3IndSeq(IndexRead) | 5′-GTTGGAGGCTCATCGTTCCTAGC-3′ |

### Example 4

### Identification of Candidate Marker Regions

[0063] As described herein, marker regions which may be utilized in the present methods and compositions have been identified by extensive analyses of published and unpublished DNA methylation data on whole blood, cancers, and placenta. 1,484 candidate marker regions (listed in Table 1 provided below; the information in the rows and columns of this table has been provided as continuous text from which the rows and columns can be generated; in particular, rows of the table are separated by “;” and columns of each row are separated by “/”; Column 1 is Cluster ID, Column 2 is Chromosome #, Column 3 is Start Position, and Column 4 is End Position) that exhibit large methylation difference between whole blood and two types of cancer cell lines (pancreatic cancer, glioblastoma multiform, lung cancer) were identified, as well as 1,600 candidate marker regions that exhibit large methylation difference between whole blood and placenta (listed in Table 2 provided below; the information in the rows and columns of this table has been provided as continuous text from which the rows and columns can be generated; in particular, rows of the table are separated by “;” and columns of each row are separated by “/”; Column 1 is Chromosome #, Column 2 is Start Position, Column 3 is End Position, and Column 4 is Cluster ID). Umi-BSPP (FIG. 3), which is an improved version of Bisulfite Padlock Probes (BSPP, Deng et al, 2009; Diep et al. 2012) was designed for targeted methylation sequencing of these candidate marker regions of whole blood and a panel of five cancer (pancreatic cancer and glioblastoma) cell lines. These probes have built-in Unique Molecule Identifier (Kivioja et al. 2011), so that deep sequencing and true single-molecule counting can be performed to avoid quantification artefacts due to DNA amplification.

### Example 5

### Deriving Methylation Haplotypes from Sequencing Data

[0064] A total of 7,109 long oligonucleotides were designed and synthesized for the candidate targets, and were converted into functional bisulfite padlock probes (see Table 3 provided below and the Sequence Listing submitted herewith; the information in the rows and columns of Table 3 has been provided as continuous text from which the rows and columns can be generated; in particular, rows of Table 3 are separated by “;” and columns of each row are separated by “/”; Column 1 is SEQ ID NO, and Column 2 is Binding Site). These probes were used for targeted methylation sequencing of whole blood samples and cancer cell lines. Computational analysis of methylation haplotypes started with bisulfite sequencing reads mapped to the reference genome (using common bisulfite read mapping algorithms, such as bisReadMapper, bisMark) in the format of barn files. Consensus sequencing reads based on UMI (if available) were derived, then the methylation haplotypes on multiple CpG sites in single consensus sequencing reads (FIG. 4) were determined. The haplotypes and their counts in all genomic regions assayed were reported. For selection of the marker region set that can classify plasma samples, a methylated haplotype load (MHL) was defined for each candidate marker region, which is the normalized fraction of methylated haplotypes at different length:

$$MHL = \frac{{\sum }_{i = 1}^{i} {w}_{i} P ( {MH}_{i} )}{{\sum }_{i = 1}^{i} {w}_{i}}$$

where i is the length of haplotypes, P(MHᵢ) is the fraction of fully methylated haplotype with i loci. For a haplotype (a string) of length L, all the sub-strings with length from 1 to L were considered in this calculation. wᵢ is the weight for i-locus haplotype. wᵢ=i or wᵢ=i² were typically used to favor the contribution of longer sub-strings. After calculating MHL for all candidate regions for all samples, a MHL matrix was built for feature selection, using standard machine learning approaches such as SVM, random forest or MRMR.

### Example 6

### Detection Sensitivity and Confidence for Cancer-Specific DNA

[0065] Multiple rounds of screening were performed for a subset of probes that are sensitive, robust and informative. A set of 2,489 cancer probes were selected for detecting various levels of cancer and whole blood DNA mixtures (0%, 0.2%, 0.5%, 1%, 2%, 5%, 10%, 20%) (FIG. 5). This first proof-of-concept experiment clearly indicated that multi-CpG methylation haplotypes are very effective in separating cancer DNA from whole blood for sensitive and quantitative detection.

### Example 7

### Quantifying Fetal Chromosome Dosage Using Methylation Haplotyping

[0066] Next, the possibilities of identifying fetal indicative haplotypes and using the sequencing reads mapped to these haplotypes for quantifying fetal chromosome dosage for non-invasive prenatal diagnosis of chromosomal abnormality such as trisomy 21 in blood were tested. By subsampling the captured sequencing reads that mapped to individual chromosomes and generating synthetic mixture of cancer trisomy 18 and 21 with diploid whole blood DNA, significant gains of a single copy of chromosome 18 at 2% or chromosome 21 at 5% levels (FIG. 6) were detected. These results demonstrate that quantitative detection of chromosomal abnormality in DNA/cells that carry methylation signatures distinct from whole blood is possible with methylation haplotypes. The detection sensitivity can be further improved by additional optimization of the marker region selection and refining the statistical model when larger data sets are available.

### Example 8

### Detecting Tumor in Clinical Samples Using Methylation Haplotyping

[0067] The presently disclosed methods and compositions encompass modifications which provide further increases in sensitivity, reliability and efficiency. The power of the methylation haplotyping method increases greatly as more informative regions are included. The ˜500 informative targets in a first study came from a screen of ˜2% of the genome of which methylation data are public available. Only 42 genomic loci were used to quantify chromosome dosage. By performing whole genome bisulfite sequencing of a larger number of cancer samples and placenta, which provided methylation information in >90% of the genome, the targets were increased by 40-50 fold. It has been previously demonstrated that methylation capture and sequencing with at least 330,000 probes can be performed in one reaction at the cost of ˜$200. With additional rounds of optimization, highly informative and specific probe sets at the size of ˜10,000 and the assay cost below $50 can be developed. This should improve the limit of detection well below 0.1% for both cancer DNA detection and fetal trisomy detection.

[0068] The feasibility of detecting tumor signatures in clinical samples based on the methylation haplotypes was tested. 30 patient plasma samples were obtained, 10 from each of the three cancer types: colon cancer, lung cancer and pancreatic cancer. 15 fresh frozen primary cancer tissues were collected, 5 per cancer type from the same patients that plasma samples were collected. In addition, 30 plasma samples from normal individuals with no detectible cancer were included as the negative controls.

[0069] An unbiased approach to systematically screen for candidate markers appropriate for MONOD was taken. In the first strategy, the published whole genome bisulfate sequencing data from human whole blood was analyzed, and blood unmethylation regions (UMRs) were searched for. These UMRs represent the “windows” in the human genome in which tumor methylated haplotypes are not masked by blood methylation signatures if they are present in peripheral blood. A customized NimbleGen probe set was designed to capture a total of 29 Mb blood UMRs for the entire panel of 75 samples for bisulfite sequencing. In addition, a second strategy was used to scan the CpG dense regions (including most CpG islands) for marker region identification. Reduced representation bisulfite sequencing (RRBS) was performed on the same panel of 75 samples. From the sequencing data generated by the two experimental approaches, regions where methylated haplotypes are detectible in primary tumor samples but present at a low level or non-detectible in plasma samples from normal individuals were searched for. This genome-wide screening identified a set of 5,301 candidate regions within blood UMRs, and 9,935 candidates from the RRBS data sets. Merging these two candidate lists yielded 11,901 candidate marker regions (listed in Table 4 provided below; the information in the rows and columns of this table has been provided as continuous text from which the rows and columns can be generated; in particular, rows of the table are separated by “;” and columns of each row are separated by “/”; Column 1 is Marker Genome Position, and Column 2 is Associated Genes) where tumor indicative haplotypes can be screened for in plasma samples. From the 30 cancer patient plasma, 5,871 regions were identified within which various levels of tumor indicative methylation haplotypes were detectible from patient's plasma. FIG. 7 shows an example at the promoter region of RhoB, which has been previously identified as a marker for cancer progression. Targeted methylation sequencing probe sets focusing on these 11,901 marker regions are being designed and optimized for examining larger sets of plasma samples from cancer patients and normal controls, in order to finalizing a specific set of markers with high sensitivity and specificity.

[0070] The foregoing detailed description of embodiments refers to the accompanying drawings, which illustrate specific embodiments of the present disclosure. Other embodiments having different structures and operations do not depart from the scope of the present disclosure. The term “the invention” or the like is used with reference to certain specific examples of the many alternative aspects or embodiments of the applicants' invention set forth in this specification, and neither its use nor its absence is intended to limit the scope of the applicants' invention or the scope of the claims. This specification is divided into sections for the convenience of the reader only. Headings should not be construed as limiting of the scope of the invention. The definitions are intended as a part of the description of the invention. It will be understood that various details of the present invention may be changed without departing from the scope of the present invention. Furthermore, the foregoing description is for the purpose of illustration only, and not for the purpose of limitation.

[0071] All publications, including patent documents and scientific articles, referred to in this application and the bibliography and attachments are incorporated by reference for the referenced materials and in their entireties for all purposes to the same extent as if each individual publication were individually incorporated by reference.

[0072] Citation of the above publications or documents is not intended as an admission that any of the foregoing is pertinent prior art, nor does it constitute any admission as to the contents or date of these publications or documents.

[0073] Although the present invention has been fully described in connection with embodiments thereof with reference to the accompanying drawings, it is to be noted that various changes and modifications will become apparent to those skilled in the art. Such changes and modifications are to be understood as being included within the scope of the present invention. The various embodiments of the invention should be understood that they have been presented by way of example only, and not by way of limitation. Likewise, the various diagrams may depict an example architectural or other configuration for the invention, which is done to aid in understanding the features and functionality that can be included in the invention. The invention is not restricted to the illustrated example architectures or configurations, but can be implemented using a variety of alternative architectures and configurations. Additionally, although the invention is described above in terms of various exemplary embodiments and implementations, it should be understood that the various features and functionality described in one or more of the individual embodiments are not limited in their applicability to the particular embodiment with which they are described. They instead can, be applied, alone or in some combination, to one or more of the other embodiments of the invention, whether or not such embodiments are described, and whether or not such features are presented as being a part of a described embodiment. Thus the breadth and scope of the invention should not be limited by any of the above-described exemplary embodiments.

[0074] Terms and phrases used in this document, and embodiments thereof, unless otherwise expressly stated, should be construed as open ended as opposed to limiting. As examples of the foregoing: the term “including” should be read as meaning “including, without limitation” or the like; the term “example” is used to provide exemplary instances of the item in discussion, not an exhaustive or limiting list thereof; and adjectives such as “conventional,” “traditional,” “normal,” “standard,” “known”, and terms of similar meaning, should not be construed as limiting the item described to a given time period, or to an item available as of a given time. But instead these terms should be read to encompass conventional, traditional, normal, or standard technologies that may be available, known now, or at any time in the future. Likewise, a group of items linked with the conjunction “and” should not be read as requiring that each and every one of those items be present in the grouping, but rather should be read as “and/or” unless apparent from the context or expressly stated otherwise. Similarly, a group of items linked with the conjunction “or” should not be read as requiring mutual exclusivity among that group, but rather should also be read as “and/or” unless it is apparent from the context or expressly stated otherwise. Furthermore, although items, elements or components of the invention may be described or claimed in the singular, the plural is contemplated to be within the scope thereof unless limitation to the singular is explicitly stated. For example, “at least one” may refer to a single or plural and is not limited to either. The presence of broadening words and phrases such as “one or more,” “at least,” “but not limited to”, or other like phrases in some instances shall not be read to mean that the narrower case is intended or required in instances where such broadening phrases may be absent.

### REFERENCES

[0075] The disclosures of each of the following references are incorporated herein by reference in their entireties:
[0076] U.S. Pat. No. 8,450,061 Quantification of a minority nucleic acid species
[0077] U.S. Pat. No. 8,586,313 DNA methylation markers based on epigenetic stem cell signatures in cancer
[0078] U.S. Pat. No. 8,563,242 Method for detecting chromosomal aneuploidy
[0079] U.S. Pat. No. 8,293,470 Non-invasive fetal genetic screening by digital analysis
[0080] U.S. Pat. No. 8,288,100 Methods for detecting fetal DNA in a plasma or serum sample from a pregnant woman
[0081] U.S. Pat. No. 8,026,067 Marker for prenatal diagnosis and monitoring
[0082] U.S. Pat. No. 8,110,361 DNA methylation markers associated with the CpG island methylator phenotype (CIMP) in human colorectal cancer
[0083] Chan et al. Size distributions of maternal and fetal DNA in maternal plasma. Clin Chem. (2004) 50:88-92
[0084] Chim et al. Systematic search for placental DNA-methylation markers on chromosome 21: toward a maternal plasma-based epigenetic test for fetal trisomy 21. Clin Chem (2008) 54:500-11
[0085] Chiu et al. Noninvasive prenatal diagnosis of fetal chromosomal aneuploidy by massively parallel genomic sequencing of DNA in maternal plasma. Proc Natl Acad Sci USA. (2008) 105:20458-63
[0086] Deng et al Targeted bisulfite sequencing reveals changes in DNA methylation associated with nuclear reprogramming. Nature Biotechnology (2009) 27:353-60
[0087] Diep et al., Library-free methylation sequencing with bisulfite padlock probes. Nature Methods, (2012) 9:270-272
[0088] Fan et al. Noninvasive diagnosis of fetal aneuploidy by shotgun sequencing DNA from maternal blood. Proc Natl Acad Sci USA. (2008) 105:16266-71
[0089] Fan et al. Non-invasive prenatal measurement of the fetal genome. Nature. (2012) 487:320-4
[0090] Kitzman et al. Noninvasive whole-genome sequencing of a human fetus. Sci Transl Med. (2012) 4:137 ra76
[0091] Kivioja et al. Counting absolute numbers of molecules using unique molecular identifiers. Nat Methods (2011) 9: 72-74
[0092] Johansson et al. Targeted resequencing of candidate genes using selector probes. Nucleic Acids Res. (2011) 39:e8. doi: 10.1093/nar/gkq1005
[0093] Komori et al. Application of microdroplet PCR for large-scale targeted bisulfite sequencing. Genome Research, (2011) 21: 1738-1745
[0094] Lun et al. Noninvasive prenatal methylomic analysis by genomewide bisulfite sequencing of maternal plasma DNA. Clin Chem. (2013) 59:1583-94
[0095] Papageorgiou et al. Fetal-specific DNA methylation ratio permits noninvasive prenatal diagnosis of trisomy 21. Nature Medicine (2010) 17:510-3
[0096] Papageorgiou & Patsalis. Non-invasive prenatal diagnosis of aneuploidies: new technologies and clinical applications. Genome Med. (2012) 4:46. doi: 10.1186/gm345
[0097] Plongthongkum et al. Advances in the profiling of DNA modifications: cytosine methylation and beyond. Nature Review Genetics (2014) 15:647-661
[0098] Poon et al. Differential DNA methylation between fetus and mother as a strategy for detecting fetal DNA in maternal plasma. Clin Chem. (2002) 48:35-41
[0099] Shoemaker et al. Allele-specific methylation is prevalent and is contributed by CpG-SNPs in the human genome. Genome Research (2010) 20:883-9

TABLE 1
chr1:58/chr1/968332/968434;chr1:59/chr1/968837/969693;chr1:68/chr1/1007436/1007622;chr1:135/chr1/11183
18/1118571;chr1:161/chr1/1182106/1182226;chr1:195/chr1/1290419/1290561;chr1:222/chr1/1475063/1475298;
chr1:224/chr1/1475644/1475960;chr1:225/chr1/1476094/1476254;chr1:250/chr1/1564730/1564962;chr1:252/c
hr1/1565418/1565749;chr1:253/chr1/1565856/1566233;chr1:254/chr1/1566540/1566945;chr1:255/chr1/156735
0/1567781;chr1:359/chr1/2005180/2005560;chr1:438/chr1/2137139/2137290;chr1:604/chr1/2461529/2461950;
chr1:624/chr1/2537228/2537597;chr1:645/chr1/2706335/2706746;chr1:691/chr1/2777169/2777476;chr1:831/ch
r1/2986787/2987055;chr1:971/chr1/3155183/3155453;chr1:1062/chr1/3310545/3310671;chr1:1191/chr1/34600
70/3460368;chr1:1196/chr1/3464790/3464968;chr1:1254/chr1/3567440/3567737;chr1:1360/chr1/4221485/4221
616;chr1:1408/chr1/4714362/4715427;chr1:1594/chr1/6126114/6126470;chr1:1690/chr1/6507256/6507490;chr
1:1739/chr1/7022040/7022295;chr1:1852/chr1/8277143/8277775;chr1:1974/chr1/10698623/10698890;chr1:220
5/chr1/12123554/12123787;chr1:2257/chr1/13839872/13840257;chr1:2371/chr1/16085288/16085860;chr1:256
6/chr1/18434320/18434751;chr1:3001/chr1/25255611/25255920;chr1:3004/chr1/25256824/25257156;chr1:315
0/chr1/27687074/27687463;chr1:3166/chr1/27895125/27895276;chr1:3196/chr1/29101687/29102039;chr1:320
9/chr1/29447872/29448068;chr1:3370/chr1/32827302/32827549;chr1:3371/chr1/32827824/32828016;chr1:340
0/chr1/33772282/33772445;chr1:3435/chr1/34642501/34642862;chr1:3496/chr1/36772176/36772239;chr1:353
9/chr1/37499683/37500013;chr1:3659/chr1/39957336/39957828;chr1:3709/chr1/41327514/41327843;chr1:376
7/chr1/43250819/43251073;chr1:3774/chr1/43533912/43534019;chr1:3805/chr1/44031559/44031834;chr1:384
5/chr1/44703923/44704146;chr1:3849/chr1/44872723/44872923;chr1:3851/chr1/44873173/44873509;chr1:385
6/chr1/44883215/44883459;chr1:3867/chr1/45082839/45083207;chr1:3916/chr1/46951318/46951628;chr1:395
3/chr1/47899597/47899892;chr1:3956/chr1/47904465/47904617;chr1:3957/chr1/47904733/47905407;chr1:405
1/chr1/50887085/50887175;chr1:4054/chr1/50888796/50889123;chr1:4108/chr1/53308608/53308688;chr1:417
7/chr1/54203422/54203828;chr1:4300/chr1/59041865/59042065;chr1:4313/chr1/60280395/60280812;chr1:436
3/chr1/63785293/63785618;chr1:4364/chr1/63785767/63786078;chr1:4370/chr1/63788767/63788919;chr1:437
1/chr1/63789497/63789728;chr1:4372/chr1/63789913/63790252;chr1:4393/chr1/65731506/65731781;chr1:448
6/chr1/77333924/77334021;chr1:4541/chr1/85358593/85358751;chr1:4547/chr1/85513805/85514226;chr1:456
6/chr1/86622552/86622812;chr1:4624/chr1/91183196/91183250;chr1:4640/chr1/91301627/91301840;chr1:482
4/chr1/110611514/110611653;chr1:4827/chr1/110612790/110613458;chr1:4838/chr1/110754580/110754871;c
hr1:4861/chr1/111216973/111217194;chr1:4908/chr1/113051685/113052056;chr1:4913/chr1/113286816/11328
7033;chr1:4957/chr1/115632038/115632104;chr1:5019/chr1/119526932/119527162;chr1:5025/chr1/119531997/
119532195;chr1:5027/chr1/119532784/119533069;chr1:5084/chr1/145562808/145562950;chr1:5137/chr1/150
522024/150522173;chr1:5180/chr1/151810485/151811028;chr1:5181/chr1/151811135/151811370;chr1:5284/c
hr1/154474585/154474743;chr1:5286/chr1/154475068/154475371;chr1:5370/chr1/156046537/156046781;chr1:
5568/chr1/161008704/161008977;chr1:5686/chr1/166916950/166917124;chr1:5882/chr1/180202395/18020263
7;chr1:6194/chr1/203044677/203045044;chr1:6195/chr1/203045172/203045278;chr1:6544/chr1/214153342/21
4153549;chr1:6573/chr1/217313043/217313068;chr1:6808/chr1/228135751/228135899;chr1:6929/chr1/228603
924/228604123;chr1:7109/chr1/234040481/234040885;chr1:7175/chr1/235813797/235814009;chr1:7209/chr1/
237205302/237205999;chr1:7210/chr1/237206266/237206511;chr1:7243/chr1/240161381/240161546;chr1:724
9/chr1/240256159/240256624;chr1:7360/chr1/246952274/246952510;chr1:7412/chr1/248020631/248020956;c
hr10:386/chr10/5734709/5734827;chr10:467/chr10/7450190/7450265;chr10:503/chr10/8076177/8076340;chr10:
519/chr10/8093964/8094141;chr10:524/chr10/8097588/8098078;chr10:583/chr10/11059664/11059932;chr10:5
84/chr10/11060158/11060314;chr10:585/chr10/11060435/11060512;chr10:586/chr10/11060629/11060741;chr1
0:629/chr10/11784414/11784802;chr10:784/chr10/16562043/16562368;chr10:801/chr10/17496096/17496544;c
hr10:808/chr10/18429329/18429517;chr10:846/chr10/21789240/21789471;chr10:848/chr10/21799129/2179941
9;chr10:859/chr10/22541851/22542024;chr10:861/chr10/22542250/22542567;chr10:872/chr10/22634175/2263
4324;chr10:905/chr10/23480697/23480903;chr10:906/chr10/23481050/23481303;chr10:950/chr10/26223206/2
6223425;chr10:958/chr10/26680735/26680960;chr10:983/chr10/28034556/28034873;chr10:1049/chr10/300240
81/30024742;chr10:1053/chr10/30025553/30026076;chr10:1066/chr10/30347775/30348116;chr10:1133/chr10/
35928850/35929333;chr10:1246/chr10/43600357/43600550;chr10:1271/chr10/43762277/43762357;chr10:1587/
chr10/52177823/52178170;chr10:1637/chr10/60936730/60937041;chr10:1956/chr10/73846982/73847427;chr1
0:1958/chr10/73847792/73848208;chr10:2022/chr10/77155863/77156184;chr10:2024/chr10/77156697/771568
85;chr10:2027/chr10/77158979/77159413;chr10:2138/chr10/81001956/81002247;chr10:2140/chr10/81002800/
81003671;chr10:2308/chr10/88122942/88123336;chr10:2309/chr10/88123453/88123631;chr10:2315/chr10/881
27133/88127346;chr10:2350/chr10/88728360/88728545;chr10:2358/chr10/90342871/90343138;chr10:2401/chr
10/94449496/94449797;chr10:2403/chr10/94450162/94450377;chr10:2407/chr10/94451603/94451827;chr10:2
424/chr10/94822606/94822908;chr10:2605/chr10/101281858/101282079;chr10:2667/chr10/102475409/102475
555;chr10:2670/chr10/102483796/102483870;chr10:2676/chr10/102507536/102507767;chr10:2698/chr10/1025
86406/102587188;chr10:2699/chr10/102587336/102587491;chr10:2700/chr10/102587613/102587830;chr10:27
05/chr10/102589101/102589250;chr10:2740/chr10/102899856/102900262;chr10:2761/chr10/102986953/10298
7206;chr10:2794/chr10/103538941/103538980;chr10:2795/chr10/103539125/103539367;chr10:2874/chr10/105
344239/105344746;chr10:2898/chr10/106028444/106028780;chr10:2911/chr10/106400918/106401322;chr10:2
949/chr10/108924401/108924769;chr10:2950/chr10/109674495/109674628;chr10:3131/chr10/118030732/1180
31118;chr10:3171/chr10/118893826/118893966;chr10:3172/chr10/118894072/118894477;chr10:3180/chr10/11
8899603/118899892;chr10:3225/chr10/119304986/119305061;chr10:3240/chr10/119494601/119494781;chr10:
3406/chr10/123922683/123923343;chr10:3443/chr10/124894607/124894870;chr10:3445/chr10/124896533/124
896937;chr10:3456/chr10/124909115/124909252;chr10:3457/chr10/124909538/124909673;chr10:3506/chr10/1
25651163/125651372;chr10:3516/chr10/125751136/125751180;chr10:3652/chr10/126840732/126840965;chr1
0:3710/chr10/128077241/128077431;chr10:3723/chr10/128995029/128995165;chr10:3746/chr10/129537031/1
29537354;chr10:4051/chr10/131757051/131757336;chr10:4054/chr10/131758037/131758094;chr10:4059/chr1
0/131763337/131763632;chr10:4068/chr10/131771168/131771281;chr10:4269/chr10/133109261/133110064;c
hr10:4270/chr10/133110185/133110486;chr10:4357/chr10/133796059/133796301;chr10:4449/chr10/13399912
7/133999350;chr10:4581/chr10/134598091/134598367;chr10:4582/chr10/134598534/134598860;chr10:4583/c
hr10/134599022/134599431;chr10:4584/chr10/134599546/134599708;chr10:4591/chr10/134601716/13460212
7;chr10:4732/chr10/134844677/134844889;chr10:4752/chr10/134862350/134862692;chr10:4868/chr10/135015
670/135016076;chr10:4898/chr10/135051810/135052097;chr10:4942/chr10/135192999/135193244;chr11:5/chr
11/280219/280472;chr11:69/chr11/504414/504539;chr11:75/chr11/536877/537026;chr11:98/chr11/626878/627
485;chr11:99/chr11/636907/637038;chr11:104/chr11/639571/639682;chr11:105/chr11/640059/640327;chr11:11
7/chr11/725713/725819;chr11:141/chr11/849371/850150;chr11:296/chr11/1358387/1358616;chr11:320/chr11/1
411785/1411841;chr11:389/chr11/1578093/1578391;chr11:461/chr11/1863865/1864192;chr11:550/chr11/1995
325/1995715;chr11:692/chr11/2236841/2237047;chr11:716/chr11/2291494/2291800;chr11:937/chr11/2871682/
2871856;chr11:1079/chr11/6651439/6651789;chr11:1094/chr11/7694886/7695108;chr11:1212/chr11/13030919/
13031244;chr11:1214/chr11/13032015/13032093;chr11:1427/chr11/20385280/20385481;chr11:1511/chr11/31
826831/31827113;chr11:1916/chr11/47416373/47416553;chr11:2133/chr11/61277120/61277327;chr11:2224/c
hr11/62212000/62212194;chr11:2279/chr11/63530253/63530615;chr11:2301/chr11/63767722/63768254;chr11:
2420/chr11/64428251/64428503;chr11:2460/chr11/64815091/64815281;chr11:2488/chr11/65246358/65246590
;chr11:2492/chr11/65313893/65314556;chr11:2506/chr11/65408370/65408651;chr11:2512/chr11/65553813/65
554042;chr11:2620/chr11/66885240/66886029;chr11:2667/chr11/67290667/67291004;chr11:2774/chr11/68145
282/68145588;chr11:3337/chr11/72295437/72295752;chr11:3411/chr11/74952729/74952943;chr11:3507/chr11/
76750930/76751074;chr11:3663/chr11/94134464/94134576;chr11:3664/chr11/94277706/94277933;chr11:371
0/chr11/100998745/100999022;chr11:3716/chr11/101454054/101454510;chr11:3841/chr11/112834094/112834
186;chr11:4166/chr11/119211245/119211650;chr11:4451/chr11/124790815/124791232;chr11:4458/chr11/1250
36487/125036720;chr11:4527/chr11/126286452/126286736;chr11:4678/chr11/130029438/130029860;chr11:46
86/chr11/130067674/130067921;chr11:4765/chr11/131780484/131780876;chr11:4766/chr11/131781151/13178
1293;chr12:51/chr12/679668/679979;chr12:156/chr12/2800446/2800603;chr12:157/chr12/2800841/2801019;ch
r12:307/chr12/4918889/4919144;chr12:417/chr12/6472994/6473162;chr12:428/chr12/6664523/6665446;chr12:
438/chr12/6882868/6883074;chr12:464/chr12/7592800/7592993;chr12:692/chr12/29302773/29302926;chr12:7
87/chr12/33592848/33592932;chr12:1084/chr12/50297555/50297973;chr12:1090/chr12/50354840/50355598;c
hr12:1112/chr12/51717749/51718204;chr12:1118/chr12/52115423/52115659;chr12:1125/chr12/52215177/5221
5837;chr12:1140/chr12/52301306/52301505;chr12:1169/chr12/52627047/52627272;chr12:1171/chr12/5265222
0/52652599;chr12:1258/chr12/54071000/54071194;chr12:1277/chr12/54338818/54338978;chr12:1282/chr12/5
4345659/54345965;chr12:1296/chr12/54355087/54355570;chr12:1313/chr12/54423458/54423615;chr12:1318/
chr12/54427107/54427293;chr12:1319/chr12/54427636/54427969;chr12:1321/chr12/54428361/54428699;chr1
2:1322/chr12/54441153/54441308;chr12:1427/chr12/57618711/57619110;chr12:1447/chr12/58013486/580137
13;chr12:1452/chr12/58021569/58021713;chr12:1457/chr12/58120237/58120457;chr12:1460/chr12/58129854/
58130183;chr12:1462/chr12/58131299/58131642;chr12:1463/chr12/58131768/58132114;chr12:1523/chr12/652
18551/65218900;chr12:1542/chr12/66123101/66123380;chr12:1613/chr12/72666032/72666342;chr12:1614/chr
12/72666808/72666908;chr12:1757/chr12/95941919/95942964;chr12:1797/chr12/99288962/99289161;chr12:1
858/chr12/104609797/104610080;chr12:1860/chr12/104697389/104697667;chr12:2428/chr12/117798950/1177
99086;chr12:2587/chr12/122016450/122016683;chr12:2890/chr12/127210935/127211316;chr12:2900/chr12/12
7630550/127630737;chr12:2942/chr12/128751878/128752114;chr12:2984/chr12/129337910/129338587;chr12:
3051/chr12/130388069/130388254;chr12:3052/chr12/130388435/130389012;chr12:3094/chr12/130646712/130
646945;chr12:3095/chr12/130647116/130647573;chr12:3097/chr12/130648070/130648407;chr12:3126/chr12/1
30909071/130909208;chr12:3619/chr12/133484853/133485161;chr13:45/chr13/20176135/20176478;chr13:85/
chr13/20875755/20876106;chr13:100/chr13/21295721/21296329;chr13:236/chr13/25320109/25320387;chr13:2
60/chr13/25744803/25744912;chr13:289/chr13/26625657/26626239;chr13:341/chr13/28498275/28498512;chr1
3:356/chr13/28549892/28550173;chr13:368/chr13/28674227/28674720;chr13:386/chr13/29107064/29107252;c
hr13:401/chr13/29394029/29394329;chr13:402/chr13/29394448/29394546;chr13:452/chr13/31480521/3148083
2;chr13:498/chr13/36045150/36045456;chr13:518/chr13/37005595/37005899;chr13:519/chr13/37006063/3700
6402;chr13:521/chr13/37248161/37248294;chr13:561/chr13/43148277/43148436;chr13:657/chr13/49794926/4
9795434;chr13:699/chr13/53174405/53174673;chr13:708/chr13/53420021/53420241;chr13:714/chr13/5342141
0/53421693;chr13:865/chr13/79170114/79170347;chr13:869/chr13/79176126/79176276;chr13:870/chr13/7917
6421/79176608;chr13:874/chr13/79177624/79177885;chr13:877/chr13/79183424/79183745;chr13:917/chr13/8
8324570/88324920;chr13:982/chr13/96294229/96294551;chr13:1053/chr13/100548190/100548513;chr13:1060/
chr13/100608036/100608461;chr13:1076/chr13/100641409/100642119;chr13:1082/chr13/100649576/1006497
99;chr13:1108/chr13/102568945/102569312;chr13:1173/chr13/109147863/109148154;chr13:1184/chr13/10979
2880/109793576;chr13:1196/chr13/110437010/110437493;chr13:1456/chr13/112721131/112721481;chr13:145
8/chr13/112721913/112722128;chr13:1461/chr13/112722982/112723292;chr13:1467/chr13/112727176/112727
256;chr13:1468/chr13/112727371/112727837;chr13:1471/chr13/112758691/112759038;chr13:1687/chr13/1136
99430/113699799;chr13:1700/chr13/113763898/113764152;chr13:1702/chr13/113764478/113764786;chr13:17
82/chr13/114523897/114524158;chr14:92/chr14/23834919/23834990;chr14:125/chr14/24045418/24045614;chr
14:157/chr14/24780119/24780742;chr14:164/chr14/24804123/24804352;chr14:212/chr14/27067157/27067372;
chr14:226/chr14/29235639/29235780;chr14:229/chr14/29236335/29236413;chr14:288/chr14/34419738/344198
20;chr14:312/chr14/36973222/36973454;chr14:322/chr14/36986664/36986872;chr14:323/chr14/36987031/369
87301;chr14:341/chr14/37053226/37053429;chr14:343/chr14/37116390/37116652;chr14:354/chr14/37127873/
37128139;chr14:363/chr14/37136018/37136294;chr14:369/chr14/37667110/37667286;chr14:379/chr14/380573
91/38057503;chr14:382/chr14/38061172/38061326;chr14:387/chr14/38064307/38064382;chr14:393/chr14/380
67496/38067697;chr14:397/chr14/38091399/38091606;chr14:411/chr14/38724544/38724978;chr14:454/chr14/
48144065/48144255;chr14:530/chr14/54421721/54421784;chr14:578/chr14/57264807/57265147;chr14:586/chr
14/57275874/57276073;chr14:625/chr14/59931122/59931193;chr14:626/chr14/59931439/59931719;chr14:627/
chr14/59931831/59932273;chr14:630/chr14/60097247/60097406;chr14:660/chr14/60981813/60981863;chr14:6
88/chr14/61746977/61747388;chr14:704/chr14/62217805/62217917;chr14:761/chr14/65209968/65210187;chr1
4:847/chr14/69095025/69095335;chr14:881/chr14/70038418/70038884;chr14:931/chr14/72399233/72399451;c
hr14:986/chr14/73958141/73958379;chr14:987/chr14/73958528/73958597;chr14:1032/chr14/75078243/750786
51;chr14:1137/chr14/77492338/77492788;chr14:1314/chr14/90528807/90528869;chr14:1402/chr14/92789822/
92789959;chr14:1433/chr14/93153549/93153846;chr14:1434/chr14/93154014/93154180;chr14:1435/chr14/931
54317/93154577;chr14:1600/chr14/95826752/95826905;chr14:1633/chr14/96343435/96343667;chr14:1682/chr
14/97499627/97499846;chr14:1768/chr14/99712739/99712922;chr14:1863/chr14/100626174/100626295;chr14:
1947/chr14/101193213/101193397;chr14:2038/chr14/101923687/101924030;chr14:2041/chr14/101925072/10
1925655;chr14:2078/chr14/102027172/102027654;chr14:2086/chr14/102057107/102057319;chr14:2099/chr14/
102172095/102172424;chr14:2140/chr14/103011141/103011360;chr14:2165/chr14/103395458/103395685;chr
14:2166/chr14/103395836/103396042;chr14:2167/chr14/103396311/103396470;chr14:2206/chr14/103674080/
103674215;chr14:2219/chr14/103739763/103739884;chr14:2285/chr14/104552067/104552238;chr14:2327/chr
14/104621931/104622185;chr14:2662/chr14/105553234/105553359;chr14:2727/chr14/105714589/105715025;
chr14:2758/chr14/105944309/105944557;chr14:2764/chr14/105953462/105953699;chr14:2833/chr14/1063205
09/106320797;chr15:201/chr15/27017335/27017654;chr15:202/chr15/27017905/27018210;chr15:203/chr15/27
018329/27018746;chr15:207/chr15/27112167/27112889;chr15:219/chr15/27216244/27216828;chr15:260/chr15/
28342020/28342440;chr15:264/chr15/28352543/28352930;chr15:275/chr15/29131048/29131532;chr15:428/ch
r15/31775783/31776145;chr15:523/chr15/37172508/37172792;chr15:578/chr15/40583657/40583807;chr15:628/
chr15/41787541/41788033;chr15:634/chr15/41794910/41795272;chr15:753/chr15/45479517/45479774;chr15:
839/chr15/52404573/52405032;chr15:867/chr15/53097569/53097777;chr15:935/chr15/58357220/58357437;chr
15:937/chr15/58357820/58358473;chr15:982/chr15/60296618/60296814;chr15:983/chr15/60296924/60297151;
chr15:1086/chr15/65116058/65116317;chr15:1162/chr15/66947282/66947434;chr15:1175/chr15/67325908/673
26118;chr15:1198/chr15/68119175/68119578;chr15:1200/chr15/68120353/68120577;chr15:1205/chr15/681221
34/68122469;chr15:1417/chr15/74425693/74426099;chr15:1477/chr15/75248484/75248822;chr15:1535/chr15/
76629026/76629162;chr15:1538/chr15/76630315/76630519;chr15:1553/chr15/76635110/76635575;chr15:1556/
chr15/76638497/76638855;chr15:1558/chr15/76639475/76639732;chr15:1830/chr15/83952113/83952430;chr1
5:1832/chr15/83953049/83953883;chr15:1841/chr15/84322323/84322476;chr15:1842/chr15/84322597/843229
93;chr15:1843/chr15/84323213/84323434;chr15:1864/chr15/85360568/85360738;chr15:2003/chr15/89922038/
89922499;chr15:2011/chr15/89950737/89951081;chr15:2015/chr15/89952453/89952699;chr15:2019/chr15/899
54842/89955001;chr15:2063/chr15/90543309/90543675;chr15:2091/chr15/91427469/91427788;chr15:2252/chr
15/95388002/95388253;chr15:2253/chr15/95388355/95388665;chr15:2393/chr15/99645065/99645300;chr15:2
467/chr15/100881844/100881966;chr15:2482/chr15/101267567/101267903;chr15:2490/chr15/101389973/1013
90107;chr15:2501/chr15/101513398/101513805;chr15:2502/chr15/101514012/101514212;chr15:2554/chr15/10
2029494/102030030;chr16:15/chr16/230316/230490;chr16:74/chr16/610501/610726;chr16:110/chr16/744110/7
44483;chr16:111/chr16/744849/745019;chr16:112/chr16/745122/745316;chr16:224/chr16/1024491/1024739;ch
r16:234/chr16/1034974/1035437;chr16:241/chr16/1040680/1041333;chr16:375/chr16/1203029/1203265;chr16:
393/chr16/1210829/1211001;chr16:549/chr16/1583820/1583986;chr16:660/chr16/2228968/2229216;chr16:679/
chr16/2286786/2286970;chr16:693/chr16/2392062/2392145;chr16:726/chr16/2835384/2835705;chr16:756/chr1
6/3016850/3017152;chr16:757/chr16/3017431/3017640;chr16:825/chr16/3550065/3550205;chr16:909/chr16/44
26241/4426409;chr16:1124/chr16/9107070/9107282;chr16:1299/chr16/12995804/12996073;chr16:1569/chr16/
22825470/22825885;chr16:1604/chr16/23847107/23847179;chr16:1606/chr16/23847512/23847788;chr16:1666/
chr16/25704123/25704271;chr16:1850/chr16/29888023/29888359;chr16:1968/chr16/31488749/31488924;chr1
6:2161/chr16/49316316/49316508;chr16:2379/chr16/51168338/51168672;chr16:2386/chr16/51185410/511855
42;chr16:2389/chr16/51186329/51186595;chr16:2445/chr16/54324187/54324470;chr16:2474/chr16/54970258/
54970523;chr16:2476/chr16/54971007/54971225;chr16:2477/chr16/54971586/54971790;chr16:2511/chr16/553
58351/55358566;chr16:2526/chr16/55543053/55543209;chr16:2542/chr16/56228417/56228577;chr16:2582/chr
16/56669402/56669552;chr16:2668/chr16/58058589/58058926;chr16:2827/chr16/66613096/66613334;chr16:2
882/chr16/67428252/67428716;chr16:2907/chr16/67687484/67687638;chr16:2915/chr16/67918680/67918901;
chr16:2924/chr16/68118640/68118759;chr16:3092/chr16/73096889/73097141;chr16:3098/chr16/73100299/731
00575;chr16:3215/chr16/77468458/77469028;chr16:3585/chr16/85320512/85320774;chr16:3821/chr16/865420
53/86542112;chr16:3825/chr16/86544652/86544928;chr16:3863/chr16/86962690/86962924;chr16:3925/chr16/
87636491/87636626;chr16:4071/chr16/88442893/88443159;chr16:4109/chr16/88496740/88497351;chr16:4179/
chr16/88600726/88601095;chr16:4191/chr16/88700818/88701421;chr17:176/chr17/1173782/1174273;chr17:2
70/chr17/1958883/1959132;chr17:271/chr17/1959264/1959436;chr17:273/chr17/1959751/1960008;chr17:274/c
hr17/1960198/1960286;chr17:275/chr17/1960474/1960778;chr17:276/chr17/1960883/1961088;chr17:279/chr17/
1962230/1962612;chr17:309/chr17/2627584/2627798;chr17:534/chr17/4802300/4802981;chr17:537/chr17/480
4078/4804454;chr17:550/chr17/4981549/4981823;chr17:551/chr17/5000936/5001149;chr17:658/chr17/689940
3/6899645;chr17:715/chr17/7287208/7287338;chr17:859/chr17/8926559/8926812;chr17:965/chr17/10101448/1
0102264;chr17:1003/chr17/11143844/11144748;chr17:1004/chr17/11144852/11144922;chr17:1078/chr17/1287
7459/12877650;chr17:1098/chr17/13504770/13504982;chr17:1113/chr17/14212473/14212588;chr17:1218/chr1
7/17399137/17399419;chr17:1243/chr17/17625795/17626075;chr17:1256/chr17/17713331/17713585;chr17:13
16/chr17/19627925/19628208;chr17:1522/chr17/27038686/27038906;chr17:1552/chr17/27940338/27940509;c
hr17:1558/chr17/28088300/28088606;chr17:1606/chr17/30244207/30244357;chr17:1676/chr17/32484214/3248
4265;chr17:1813/chr17/35299444/35299600;chr17:1814/chr17/35299966/35300260;chr17:1855/chr17/3666664
1/36667136;chr17:1867/chr17/36718155/36718367;chr17:1933/chr17/38334152/38334396;chr17:1937/chr17/3
8473031/38473221;chr17:2060/chr17/40822042/40822411;chr17:2173/chr17/43037309/43037504;chr17:2175/
chr17/43044869/43045038;chr17:2176/chr17/43045266/43045371;chr17:2190/chr17/43198566/43198759;chr1
7:2281/chr17/44896870/44897012;chr17:2301/chr17/45500826/45500865;chr17:2307/chr17/45786312/457865
80;chr17:2349/chr17/46604392/46604639;chr17:2375/chr17/46710990/46711510;chr17:2385/chr17/46796374/
46796498;chr17:2417/chr17/47073328/47073388;chr17:2514/chr17/48194835/48195141;chr17:2535/chr17/485
46120/48546321;chr17:2537/chr17/48546623/48546755;chr17:2653/chr17/54755991/54756198;chr17:2750/chr
17/56564884/56565077;chr17:2778/chr17/58227398/58227787;chr17:2797/chr17/59473504/59473707;chr17:2
799/chr17/59474247/59474741;chr17:2810/chr17/59482595/59482700;chr17:2816/chr17/59488424/59488634;
chr17:2823/chr17/59529265/59529626;chr17:2827/chr17/59532018/59532148;chr17:2890/chr17/61778085/617
78234;chr17:2925/chr17/62775015/62775245;chr17:3065/chr17/70112034/70112136;chr17:3421/chr17/730737
00/73073967;chr17:3473/chr17/73584040/73584287;chr17:3474/chr17/73584485/73584937;chr17:3502/chr17/
73749654/73750176;chr17:3547/chr17/74136170/74136296;chr17:3789/chr17/76127483/76127750;chr17:4130/
chr17/77776566/77776679;chr17:4139/chr17/77788633/77789351;chr17:4140/chr17/77789528/77789833;chr1
7:4148/chr17/77814190/77814493;chr17:4170/chr17/77916767/77916996;chr17:4420/chr17/79314980/793151
31;chr17:4422/chr17/79315509/79315667;chr17:4511/chr17/79615136/79615382;chr17:4566/chr17/79919577/
79919914;chr17:4657/chr17/80332838/80332948;chr18:75/chr18/4454691/4454899;chr18:77/chr18/4455272/4
455561;chr18:91/chr18/5543158/5543430;chr18:92/chr18/5543547/5543801;chr18:97/chr18/5629826/5630124;
chr18:105/chr18/5890352/5890848;chr18:106/chr18/5891003/5891336;chr18:280/chr18/11751632/11752127;c
hr18:430/chr18/19751266/19751424;chr18:431/chr18/19751535/19751774;chr18:465/chr18/21269952/2127012
6;chr18:487/chr18/22929719/22929926;chr18:503/chr18/24130414/24130644;chr18:566/chr18/31020511/3102
0915;chr18:577/chr18/32073831/32073907;chr18:585/chr18/32847334/32847597;chr18:608/chr18/34823894/3
4823936;chr18:610/chr18/34833555/34833958;chr18:637/chr18/35065146/35065516;chr18:707/chr18/4341770
7/43417871;chr18:723/chr18/43913755/43914155;chr18:763/chr18/44336450/44337012;chr18:765/chr18/4433
7842/44338098;chr18:768/chr18/44526700/44527026;chr18:776/chr18/44773967/44774201;chr18:891/chr18/4
7794717/47795022;chr18:966/chr18/53447475/53447777;chr18:989/chr18/55019776/55020040;chr18:994/chr1
8/55094849/55095353;chr18:1044/chr18/56940171/56940565;chr18:1046/chr18/56941245/56941557;chr18:10
54/chr18/57364050/57364448;chr18:1125/chr18/63417896/63418336;chr18:1140/chr18/67068114/67068592;c
hr18:1150/chr18/70209386/70209493;chr18:1153/chr18/70534316/70534426;chr18:1155/chr18/70534732/7053
5220;chr18:1223/chr18/72916657/72916830;chr18:1256/chr18/73628238/73628494;chr18:1360/chr18/7496235
8/74962692;chr18:1609/chr18/76739081/76739420;chr18:1610/chr18/76739575/76739634;chr18:1611/chr18/7
6739745/76740101;chr18:1613/chr18/76740404/76741072;chr18:1633/chr18/76828918/76829011;chr18:1804/
chr18/77389255/77389513;chr18:1835/chr18/77548048/77548351;chr19:56/chr19/518850/519279;chr19:69/chr
19/591646/591765;chr19:158/chr19/863044/863220;chr19:211/chr19/1041941/1042228;chr19:267/chr19/11688
50/1169089;chr19:298/chr19/1256998/1257181;chr19:322/chr19/1295636/1295874;chr19:325/chr19/1302544/1
302808;chr19:362/chr19/1457047/1457373;chr19:367/chr19/1467273/1468805;chr19:368/chr19/1468943/1469
945;chr19:369/chr19/1470071/1470383;chr19:372/chr19/1470953/1471094;chr19:392/chr19/1524150/1524433;
chr19:452/chr19/1762506/1762627;chr19:550/chr19/2250706/2251061;chr19:551/chr19/2251235/2251610;chr1
9:553/chr19/2251950/2252313;chr19:562/chr19/2282567/2282729;chr19:566/chr19/2290272/2290630;chr19:56
7/chr19/2290868/2291315;chr19:759/chr19/3435252/3435460;chr19:830/chr19/3786221/3786583;chr19:918/ch
r19/4328745/4328968;chr19:1180/chr19/6744856/6745014;chr19:1417/chr19/9473598/9473868;chr19:1577/chr
19/11689685/11689880;chr19:1690/chr19/13207431/13207610;chr19:1696/chr19/13209705/13210566;chr19:1
699/chr19/13215258/13215542;chr19:1717/chr19/13409455/13409643;chr19:1722/chr19/13616957/13617158;
chr19:1748/chr19/14089652/14089812;chr19:1749/chr19/14089930/14090019;chr19:1807/chr19/14583062/145
83153;chr19:1881/chr19/15580445/15580775;chr19:1946/chr19/16436338/16436566;chr19:1986/chr19/170085
19/17008585;chr19:1987/chr19/17008699/17008820;chr19:2029/chr19/17434486/17434656;chr19:2031/chr19/
17439019/17439359;chr19:2032/chr19/17439537/17439938;chr19:2104/chr19/17983666/17983839;chr19:2193/
chr19/18771109/18771428;chr19:2231/chr19/18980718/18980911;chr19:2257/chr19/19335831/19335974;chr1
9:2488/chr19/29284576/29284929;chr19:2540/chr19/30016929/30017451;chr19:2639/chr19/30866025/308663
28;chr19:2725/chr19/31839566/31839837;chr19:2730/chr19/31842481/31842673;chr19:2895/chr19/34112730/
34113145;chr19:3094/chr19/36246642/36246780;chr19:3157/chr19/37096038/37096487;chr19:3205/chr19/380
42198/38042356;chr19:3278/chr19/38886200/38886855;chr19:3321/chr19/39086879/39087135;chr19:3462/chr
19/40729228/40729385;chr19:3497/chr19/41106002/41106351;chr19:3503/chr19/41119409/41119669;chr19:3
504/chr19/41119802/41119956;chr19:3621/chr19/42703468/42703974;chr19:3765/chr19/45900030/45900160;
chr19:3827/chr19/46387865/46387953;chr19:3833/chr19/46443412/46443636;chr19:3840/chr19/46518378/465
18642;chr19:3873/chr19/46996839/46997167;chr19:3890/chr19/47152991/47153218;chr19:3923/chr19/479103
79/47910558;chr19:3997/chr19/48946166/48946452;chr19:3998/chr19/48946629/48946707;chr19:3999/chr19/
48946849/48947361;chr19:4004/chr19/48983719/48983942;chr19:4075/chr19/49575475/49576106;chr19:4173/
chr19/50393577/50393796;chr19:4204/chr19/50789807/50789973;chr19:4216/chr19/50861847/50861922;chr1
9:4257/chr19/51162254/51162427;chr19:4357/chr19/52222924/52223142;chr19:4369/chr19/52552120/525522
33;chr19:4653/chr19/55598064/55598375;chr19:4654/chr19/55598495/55598810;chr19:4708/chr19/55997744/
55998019;chr19:4796/chr19/56988664/56988963;chr19:4808/chr19/57050288/57050428;chr19:4862/chr19/580
38585/58038923;chr19:4874/chr19/58238739/58238987;chr19:4895/chr19/58545590/58545651;chr19:4904/chr
19/58570589/58570809;chr19:4915/chr19/58609526/58609712;chr19:4937/chr19/58867803/58867983;chr19:4
939/chr19/58868255/58868372;chr19:4944/chr19/58907637/58908323;chr2:38/chr2/468234/468423;chr2:117/c
hr2/946224/946289;chr2:118/chr2/946567/946916;chr2:257/chr2/1747033/1747305;chr2:259/chr2/1748008/174
8396;chr2:525/chr2/3751257/3751367;chr2:597/chr2/5832048/5832283;chr2:598/chr2/5832526/5832655;chr2:5
99/chr2/5832847/5833282;chr2:605/chr2/5836992/5837352;chr2:667/chr2/7571477/7571576;chr2:741/chr2/881
6718/8817071;chr2:1181/chr2/24232789/24233349;chr2:1220/chr2/25438872/25439138;chr2:1230/chr2/25499
767/25500398;chr2:1263/chr2/26407561/26407743;chr2:1264/chr2/26408043/26408198;chr2:1346/chr2/27530
528/27530844;chr2:1376/chr2/29033698/29033897;chr2:1519/chr2/39187238/39187543;chr2:1550/chr2/42328
679/42328778;chr2:1560/chr2/42720447/42720653;chr2:1706/chr2/47596849/47596941;chr2:1768/chr2/54086
982/54087153;chr2:1902/chr2/63274615/63275188;chr2:1903/chr2/63275509/63275877;chr2:1921/chr2/63282
867/63283013;chr2:1925/chr2/63286164/63286358;chr2:1926/chr2/63286748/63287082;chr2:1990/chr2/66672
431/66672704;chr2:1992/chr2/66673076/66673326;chr2:2063/chr2/71115961/71116352;chr2:2164/chr2/73147
789/73147852;chr2:2215/chr2/74725139/74725244;chr2:2224/chr2/74742151/74742324;chr2:2227/chr2/74743
145/74743455;chr2:2233/chr2/74875255/74875477;chr2:2240/chr2/75147103/75147307;chr2:2322/chr2/85361
529/85361628;chr2:2426/chr2/88751816/88751942;chr2:2432/chr2/89064997/89065076;chr2:2631/chr2/99438
893/99439368;chr2:2749/chr2/105459152/105459378;chr2:2750/chr2/105459575/105459857;chr2:2758/chr2/1
05472597/105472712;chr2:2852/chr2/107502908/107503421;chr2:3000/chr2/110372422/110372665;chr2:3031/
chr2/111876685/111877171;chr2:3049/chr2/112939243/112939539;chr2:3074/chr2/114034675/114034908;chr
2:3075/chr2/114035058/114035443;chr2:3107/chr2/115918938/115919206;chr2:3108/chr2/115919425/115919
830;chr2:3447/chr2/127413996/127414108;chr2:3708/chr2/131721099/131721347;chr2:3710/chr2/131721665/
131721866;chr2:3718/chr2/131797507/131797859;chr2:3847/chr2/145281979/145282041;chr2:3916/chr2/1543
34914/154335184;chr2:3925/chr2/154728977/154729082;chr2:3996/chr2/162279888/162280152;chr2:3997/chr
2/162280416/162280604;chr2:3999/chr2/162283603/162283782;chr2:4079/chr2/171570190/171570470;chr2:4
122/chr2/172947914/172948183;chr2:4124/chr2/172952084/172952153;chr2:4127/chr2/172954739/172954982;
chr2:4131/chr2/172964889/172965295;chr2:4132/chr2/172965492/172965647;chr2:4172/chr2/174877642/174
877777;chr2:4182/chr2/175199555/175199921;chr2:4183/chr2/175200441/175200709;chr2:4186/chr2/1752012
95/175201359;chr2:4187/chr2/175201542/175201775;chr2:4189/chr2/175202246/175202568;chr2:4191/chr2/1
75204947/175205526;chr2:4214/chr2/176944847/176945137;chr2:4215/chr2/176945269/176945581;chr2:4217/
chr2/176946952/176947284;chr2:4218/chr2/176948022/176948199;chr2:4224/chr2/176957629/176957914;chr
2:4233/chr2/176972376/176972742;chr2:4245/chr2/176981212/176981376;chr2:4251/chr2/176987225/176987
465;chr2:4252/chr2/176987662/176987970;chr2:4262/chr2/176994622/176995070;chr2:4263/chr2/176995270/
176995331;chr2:4268/chr2/177016417/177016730;chr2:4269/chr2/177017078/177017331;chr2:4284/chr2/1770
36685/177036813;chr2:4287/chr2/177042999/177043266;chr2:4288/chr2/177053703/177053906;chr2:4449/chr
2/200327259/200327423;chr2:4451/chr2/200328685/200329029;chr2:4572/chr2/209271383/209271602;chr2:4
739/chr2/219866132/219866437;chr2:4772/chr2/220312976/220313971;chr2:4784/chr2/220361467/220361644;
chr2:4945/chr2/231693108/231693406;chr2:5038/chr2/233285369/233285625;chr2:5206/chr2/236579469/236
579780;chr2:5207/chr2/236579970/236580117;chr2:5231/chr2/237072391/237072610;chr2:5240/chr2/2370785
15/237078746;chr2:5244/chr2/237081427/237081536;chr2:5245/chr2/237081686/237082281;chr2:5386/chr2/2
39072474/239073018;chr2:5420/chr2/239755654/239756024;chr2:5862/chr2/242498266/242498764;chr20:16/
chr20/590749/590967;chr20:54/chr20/825407/825542;chr20:55/chr20/825845/826228;chr20:62/chr20/982799/9
82891;chr20:90/chr20/1784369/1784547;chr20:134/chr20/2673000/2673201;chr20:136/chr20/2674155/267469
6;chr20:144/chr20/2732645/2732726;chr20:476/chr20/20345958/20346166;chr20:516/chr20/21081845/210820
94;chr20:524/chr20/21376337/21376702;chr20:525/chr20/21377129/21377450;chr20:534/chr20/21491346/214
91616;chr20:555/chr20/21503174/21503454;chr20:620/chr20/23029232/23029549;chr20:732/chr20/25128964/
25129184;chr20:752/chr20/25565669/25565825;chr20:764/chr20/26189103/26189330;chr20:765/chr20/261896
86/26189956;chr20:924/chr20/32254422/32254923;chr20:925/chr20/32255610/32255936;chr20:946/chr20/328
56719/32857151;chr20:1038/chr20/36012804/36012923;chr20:1322/chr20/43727095/43727357;chr20:1381/chr
20/44686066/44686303;chr20:1728/chr20/50721671/50721988;chr20:1810/chr20/55201357/55201450;chr20:1
812/chr20/55202160/55202358;chr20:1816/chr20/55205780/55206229;chr20:1833/chr20/55500302/55500440;
chr20:1878/chr20/55965169/55965524;chr20:1991/chr20/57224597/57224798;chr20:2023/chr20/57464249/574
64384;chr20:2056/chr20/57766396/57766794;chr20:2210/chr20/59826978/59828340;chr20:2212/chr20/598286
48/59828962;chr20:2677/chr20/61638107/61638180;chr20:2719/chr20/61703466/61703709;chr20:2928/chr20/
62119619/62119922;chr20:2966/chr20/62272683/62272984;chr20:2983/chr20/62369273/62369503;chr20:3023/
chr20/62463400/62463622;chr21:56/chr21/19191198/19191363;chr21:59/chr21/19617176/19617394;chr21:10
0/chr21/27945234/27945553;chr21:102/chr21/28337870/28338039;chr21:158/chr21/32931204/32931770;chr21:
214/chr21/34442257/34442594;chr21:324/chr21/38076709/38077206;chr21:331/chr21/38080387/38080550;ch
r21:333/chr21/38081193/38081665;chr21:384/chr21/40032525/40032679;chr21:448/chr21/42218760/42218851;
chr21:666/chr21/44037202/44037470;chr21:861/chr21/45577552/45577873;chr21:948/chr21/45875391/45875
681;chr21:1054/chr21/46294322/46294496;chr21:1182/chr21/46847897/46848190;chr21:1253/chr21/47010153/
47010408;chr21:1265/chr21/47062088/47062752;chr22:14/chr22/17082524/17082786;chr22:15/chr22/170830
62/17083207;chr22:34/chr22/17566540/17566737;chr22:141/chr22/19511876/19512252;chr22:161/chr22/1971
0880/19711327;chr22:162/chr22/19711431/19711681;chr22:163/chr22/19711794/19712089;chr22:294/chr22/2
0779588/20779897;chr22:295/chr22/20780367/20780437;chr22:299/chr22/20784958/20785119;chr22:369/chr2
2/22862863/22863219;chr22:531/chr22/26565386/26565502;chr22:720/chr22/30661932/30662102;chr22:826/c
hr22/33454259/33454345;chr22:1094/chr22/38478672/38478861;chr22:1246/chr22/40045631/40045721;chr22:
1248/chr22/40057992/40058286;chr22:1288/chr22/40391230/40391446;chr22:1308/chr22/41048383/41048593;
chr22:1367/chr22/42679480/42679916;chr22:1515/chr22/43807507/43807746;chr22:1790/chr22/46263114/46
263402;chr22:1823/chr22/46368124/46368554;chr22:1842/chr22/46460277/46460482;chr22:1851/chr22/46474
655/46474921;chr22:1852/chr22/46475686/46476597;chr22:1858/chr22/46480891/46481121;chr22:1865/chr22/
46484646/46484897;chr22:1873/chr22/46500069/46500450;chr22:1894/chr22/46658743/46659224;chr22:192
1/chr22/46932357/46932650;chr22:2146/chr22/48884960/48885529;chr22:2148/chr22/48885838/48885907;chr
22:2149/chr22/48886022/48886204;chr22:2205/chr22/48970924/48971532;chr22:2206/chr22/48971680/48971
758;chr22:2208/chr22/48972136/48972219;chr22:2210/chr22/48972471/48972766;chr22:2526/chr22/49969183/
49969655;chr22:2676/chr22/50496583/50496971;chr22:2703/chr22/50623290/50623612;chr22:2705/chr22/50
629027/50629294;chr22:2722/chr22/50706290/50706502;chr22:2727/chr22/50737741/50738598;chr22:2759/c
hr22/50982723/50982902;chr22:2764/chr22/50987096/50987423;chr22:2774/chr22/51042646/51042974;chr22:
2791/chr22/51135620/51136021;chr22:2792/chr22/51136180/51136408;chr3:5/chr3/238716/239006;chr3:9/chr
3/239869/240109;chr3:20/chr3/2140435/2140827;chr3:138/chr3/8809715/8810151;chr3:160/chr3/9595199/959
5395;chr3:161/chr3/9595503/9595598;chr3:220/chr3/10857721/10858054;chr3:333/chr3/13114797/13115104;c
hr3:392/chr3/13324029/13324234;chr3:393/chr3/13324348/13324419;chr3:394/chr3/13324674/13324740;chr3:
431/chr3/13590641/13590973;chr3:649/chr3/22414078/22414264;chr3:761/chr3/32858959/32859171;chr3:762/
chr3/32859285/32859417;chr3:823/chr3/37494130/37494424;chr3:1010/chr3/45187328/45188139;chr3:1095/c
hr3/47050867/47051151;chr3:1154/chr3/48693701/48693851;chr3:1158/chr3/48699011/48699376;chr3:1321/c
hr3/51990188/51990359;chr3:1502/chr3/58572710/58572807;chr3:1611/chr3/65342126/65342389;chr3:1613/c
hr3/65534763/65534926;chr3:1614/chr3/65535125/65535274;chr3:1771/chr3/73673729/73673951;chr3:2134/c
hr3/123167020/123167300;chr3:2172/chr3/124860671/124860898;chr3:2181/chr3/125677058/125677226;chr3:
2382/chr3/128210649/128210888;chr3:2383/chr3/128211117/128211451;chr3:2384/chr3/128211603/12821176
9;chr3:2385/chr3/128211992/128212336;chr3:2394/chr3/128274052/128274308;chr3:2434/chr3/128764607/12
8764836;chr3:2471/chr3/129693499/129693954;chr3:2518/chr3/133393269/133393622;chr3:2544/chr3/134031
856/134031958;chr3:2629/chr3/138658297/138658579;chr3:2635/chr3/138663977/138664141;chr3:2636/chr3/
138664383/138664701;chr3:2641/chr3/138679293/138679565;chr3:2753/chr3/147111300/147111702;chr3:276
8/chr3/147127565/147127676;chr3:2770/chr3/147128083/147128529;chr3:2880/chr3/156544017/156544403;c
hr3:2897/chr3/157821233/157821536;chr3:2978/chr3/170137345/170137581;chr3:3063/chr3/179754873/17975
5086;chr3:3077/chr3/181413201/181413421;chr3:3168/chr3/184301671/184301892;chr3:3248/chr3/186490643/
186490790;chr3:3332/chr3/192232962/192233094;chr3:3517/chr3/196255632/196256011;chr4:5/chr4/107278/
107896;chr4:15/chr4/330292/330715;chr4:24/chr4/568681/569047;chr4:26/chr4/569866/570063;chr4:56/chr4/6
75809/676045;chr4:62/chr4/682750/682943;chr4:109/chr4/967617/967716;chr4:122/chr4/996175/996400;chr4:
123/chr4/996539/997292;chr4:158/chr4/1164982/1165095;chr4:198/chr4/1396773/1396923;chr4:202/chr4/1398
715/1398990;chr4:205/chr4/1400015/1400112;chr4:207/chr4/1400340/1400870;chr4:241/chr4/1537691/153814
8;chr4:391/chr4/2042259/2042655;chr4:470/chr4/2820092/2820468;chr4:616/chr4/3734136/3734361;chr4:637/
chr4/3769190/3769411;chr4:759/chr4/5709985/5710450;chr4:773/chr4/5894116/5894463;chr4:774/chr4/58946
33/5894812;chr4:1265/chr4/8859938/8860397;chr4:1270/chr4/8862812/8863143;chr4:1272/chr4/8863527/8863
856;chr4:1277/chr4/8873073/8873773;chr4:1280/chr4/8874535/8874713;chr4:1288/chr4/8894958/8895231;chr
4:1290/chr4/8895776/8895964;chr4:1403/chr4/13543753/13544277;chr4:1405/chr4/13545523/13545940;chr4:1
475/chr4/20254057/20254239;chr4:1479/chr4/20255368/20255524;chr4:1481/chr4/20256577/20256841;chr4:1
487/chr4/21950296/21950626;chr4:1509/chr4/24801526/24801848;chr4:1578/chr4/30723513/30723855;chr4:1
602/chr4/37245582/37245836;chr4:1604/chr4/37246700/37247015;chr4:1664/chr4/40858965/40859293;chr4:1
685/chr4/41869200/41869413;chr4:1701/chr4/42153412/42153532;chr4:1702/chr4/42153633/42153881;chr4:1
726/chr4/44449743/44449971;chr4:1727/chr4/44450177/44450741;chr4:1747/chr4/48485289/48485589;chr4:1
750/chr4/48492930/48493306;chr4:2032/chr4/81123904/81124121;chr4:2076/chr4/85403941/85404111;chr4:2
081/chr4/85414337/85414457;chr4:2084/chr4/85418583/85419049;chr4:2130/chr4/91048946/91049201;chr4:2
250/chr4/111542093/111542473;chr4:2332/chr4/122301713/122301962;chr4:2398/chr4/135122689/135122873;
chr4:2434/chr4/140656667/140656782;chr4:2508/chr4/147576223/147576329;chr4:2602/chr4/155411494/155
411850;chr4:2610/chr4/155665036/155665292;chr4:2621/chr4/158141657/158141754;chr4:2647/chr4/1642648
53/164265192;chr4:2703/chr4/172734392/172734591;chr4:2712/chr4/174427891/174428278;chr4:2716/chr4/1
74430554/174430793;chr4:2973/chr4/188916495/188916865;chr4:2981/chr4/189203770/189204020;chr5:91/c
hr5/528469/528888;chr5:221/chr5/1059174/1059425;chr5:501/chr5/1876921/1877089;chr5:504/chr5/1878577/1
878830;chr5:506/chr5/1882136/1882419;chr5:511/chr5/1886077/1886379;chr5:514/chr5/1887179/1887546;chr
5:535/chr5/1931287/1931444;chr5:703/chr5/2750517/2750654;chr5:705/chr5/2750949/2751854;chr5:706/chr5/
2751982/2752120;chr5:827/chr5/3594520/3594777;chr5:829/chr5/3595432/3595849;chr5:830/chr5/3596102/35
96347;chr5:838/chr5/3600753/3601025;chr5:839/chr5/3602351/3602713;chr5:1055/chr5/7849946/7850250;chr
5:1172/chr5/15500117/15500570;chr5:1190/chr5/16179857/16180165;chr5:1380/chr5/37840363/37840529;chr
5:1410/chr5/40681840/40682069;chr5:1434/chr5/42952112/42952433;chr5:1453/chr5/43397230/43397305;chr
5:1488/chr5/50695241/50695332;chr5:1602/chr5/59189058/59189188;chr5:1614/chr5/60922159/60922296;chr
5:1664/chr5/66462080/66462646;chr5:1679/chr5/68710972/68711443;chr5:1710/chr5/72594127/72594501;chr
5:1718/chr5/72677195/72677774;chr5:1719/chr5/72678029/72678365;chr5:1725/chr5/72732454/72732774;chr
5:1726/chr5/72732910/72733012;chr5:1789/chr5/76373091/76373686;chr5:1812/chr5/77147650/77147872;chr
5:1826/chr5/77806046/77806301;chr5:1850/chr5/79331135/79331229;chr5:1861/chr5/79865834/79866099;chr
5:1864/chr5/80256075/80256312;chr5:1926/chr5/92906273/92906757;chr5:1949/chr5/92939837/92940177;chr
5:2048/chr5/112538998/112539281;chr5:2080/chr5/115152485/115152616;chr5:2195/chr5/127873297/127873
552;chr5:2196/chr5/127873806/127873980;chr5:2198/chr5/127874478/127874705;chr5:2246/chr5/132083377/
132083472;chr5:2252/chr5/132149891/132150239;chr5:2253/chr5/132158700/132159057;chr5:2254/chr5/1321
61114/132161807;chr5:2324/chr5/134363537/134364144;chr5:2325/chr5/134364290/134364693;chr5:2354/chr
5/134825791/134825912;chr5:2364/chr5/134871102/134871337;chr5:2392/chr5/135266129/135266577;chr5:2
417/chr5/136834051/136834286;chr5:2450/chr5/138729925/138730147;chr5:2489/chr5/139228001/139228242;
chr5:2522/chr5/140306172/140306444;chr5:2559/chr5/140871113/140871639;chr5:2560/chr5/140871959/140
872219;chr5:2729/chr5/149546649/149546969;chr5:2932/chr5/158737656/158737744;chr5:2942/chr5/1593991
00/159399509;chr5:3113/chr5/170289023/170289638;chr5:3116/chr5/170735469/170735730;chr5:3119/chr5/1
70736868/170737281;chr5:3128/chr5/170847581/170847717;chr5:3129/chr5/170847951/170848081;chr5:3133/
chr5/170878017/170878251;chr5:3195/chr5/172111150/172111287;chr5:3298/chr5/174158852/174159299;chr
5:3347/chr5/175223950/175224441;chr5:3395/chr5/176023882/176024005;chr5:3481/chr5/176544032/176544
187;chr5:3484/chr5/176559854/176560001;chr5:3532/chr5/177540239/177540402;chr5:3534/chr5/177540722/
177540787;chr5:3644/chr5/178003699/178004204;chr5:3649/chr5/178016984/178017177;chr5:3695/chr5/1784
21519/178422143;chr5:3837/chr5/178957437/178957597;chr5:3858/chr5/179243878/179244320;chr5:3916/chr
5/180018132/180018484;chr5:3993/chr5/180486204/180486792;chr6:21/chr6/391900/392409;chr6:22/chr6/392
959/393124;chr6:86/chr6/1312356/1312594;chr6:92/chr6/1313904/1314000;chr6:93/chr6/1314101/1314219;chr
6:95/chr6/1378476/1379106;chr6:98/chr6/1383709/1383859;chr6:99/chr6/1384180/1384444;chr6:105/chr6/139
3049/1393301;chr6:107/chr6/1393757/1394089;chr6:138/chr6/1614406/1615083;chr6:144/chr6/1620404/16205
12;chr6:245/chr6/4775997/4776187;chr6:256/chr6/5086329/5086642;chr6:279/chr6/6003683/6004349;chr6:317/
chr6/7051662/7051765;chr6:380/chr6/10381969/10382321;chr6:384/chr6/10384975/10385279;chr6:458/chr6/1
2749941/12750364;chr6:596/chr6/19837421/19837743;chr6:789/chr6/27725175/27725416;chr6:852/chr6/2894
5154/28945523;chr6:890/chr6/29521420/29521624;chr6:920/chr6/30039130/30039476;chr6:1002/chr6/314658
39/31466177;chr6:1147/chr6/33245328/33245537;chr6:1289/chr6/35109073/35109224;chr6:1322/chr6/359922
08/35992409;chr6:1534/chr6/41515897/41516162;chr6:1567/chr6/42072071/42072647;chr6:1630/chr6/432528
33/43252896;chr6:1651/chr6/43970475/43970721;chr6:1665/chr6/44243850/44244010;chr6:1746/chr6/508180
73/50818360;chr6:1788/chr6/54711388/54711661;chr6:1872/chr6/72892268/72892444;chr6:1938/chr6/796203
42/79620474;chr6:1972/chr6/84418789/84419071;chr6:1985/chr6/85483932/85484557;chr6:2032/chr6/888764
77/88876630;chr6:2135/chr6/100051109/100051202;chr6:2142/chr6/100061697/100061988;chr6:2170/chr6/10
0913135/100913285;chr6:2182/chr6/101850539/101850938;chr6:2190/chr6/105389150/105389509;chr6:2232/
chr6/107955829/107956157;chr6:2249/chr6/108438877/108439066;chr6:2263/chr6/108489809/108490066;chr
6:2311/chr6/110797815/110797976;chr6:2384/chr6/117086640/117086902;chr6:2386/chr6/117198221/117198
339;chr6:2396/chr6/117868961/117869524;chr6:2436/chr6/125475590/125475739;chr6:2499/chr6/133562437/
133562674;chr6:2544/chr6/137244729/137245027;chr6:2558/chr6/137809917/137810026;chr6:2842/chr6/1575
57572/157558003;chr6:3358/chr6/168502019/168502200;chr6:3360/chr6/168502504/168502654;chr7:282/chr7/
751765/751986;chr7:405/chr7/1276049/1276436;chr7:547/chr7/1576917/1577229;chr7:562/chr7/1625817/162
6380;chr7:727/chr7/2539832/2540075;chr7:735/chr7/2558425/2558675;chr7:811/chr7/2968281/2968707;chr7:8
73/chr7/3340815/3341286;chr7:874/chr7/3341409/3341561;chr7:1084/chr7/4922707/4922839;chr7:1085/chr7/4
922974/4923327;chr7:1305/chr7/19156133/19156303;chr7:1307/chr7/19156746/19157055;chr7:1376/chr7/232
45561/23245864;chr7:1377/chr7/23287352/23287532;chr7:1422/chr7/25892431/25892608;chr7:1481/chr7/271
27643/27127803;chr7:1486/chr7/27141753/27141936;chr7:1491/chr7/27153135/27153399;chr7:1497/chr7/271
55002/27155372;chr7:1514/chr7/27187502/27187670;chr7:1519/chr7/27195602/27195742;chr7:1520/chr7/271
95893/27196049;chr7:1533/chr7/27204894/27205230;chr7:1536/chr7/27205790/27206082;chr7:1543/chr7/272
12984/27213188;chr7:1552/chr7/27225058/27225249;chr7:1568/chr7/27260167/27260417;chr7:1570/chr7/272
79100/27279237;chr7:1581/chr7/27291201/27291314;chr7:1788/chr7/35293478/35294003;chr7:1858/chr7/374
87454/37487755;chr7:1887/chr7/38670664/38670895;chr7:1908/chr7/39649254/39649443;chr7:1932/chr7/422
67712/42267821;chr7:2143/chr7/49813018/49813809;chr7:2146/chr7/49814751/49815020;chr7:2148/chr7/498
15250/49815543;chr7:2162/chr7/50343490/50343974;chr7:2589/chr7/70596711/70597367;chr7:2591/chr7/705
97872/70597945;chr7:2651/chr7/71801131/71801481;chr7:2696/chr7/72848129/72848426;chr7:3079/chr7/989
71677/98971810;chr7:3100/chr7/99769405/99769557;chr7:3112/chr7/100091181/100091621;chr7:3136/chr7/1
00318111/100318466;chr7:3315/chr7/103630083/103630363;chr7:3399/chr7/112430366/112430590;chr7:3412/
chr7/113727626/113727753;chr7:3421/chr7/115850578/115850693;chr7:3489/chr7/126987840/126988120;chr
7:3500/chr7/127671170/127671450;chr7:3501/chr7/127671658/127672235;chr7:3502/chr7/127672383/127672
785;chr7:3563/chr7/128809071/128809165;chr7:3586/chr7/129421709/129422115;chr7:3587/chr7/129422969/
129423125;chr7:3616/chr7/130418738/130419173;chr7:3763/chr7/139167827/139168114;chr7:3975/chr7/1491
19597/149119681;chr7:3978/chr7/149120132/149120275;chr7:4109/chr7/150655146/150655637;chr7:4146/chr
7/150778541/150778926;chr7:4153/chr7/150811800/150812813;chr7:4303/chr7/152622854/152623254;chr7:4
539/chr7/155579946/155580181;chr7:4544/chr7/155595858/155596136;chr7:4565/chr7/155744234/155744666;
chr7:4691/chr7/156796740/156796978;chr7:4724/chr7/157071962/157072392;chr7:4786/chr7/157406031/157
406394;chr7:4816/chr7/157477489/157477710;chr7:4817/chr7/157477820/157478407;chr7:4818/chr7/1574785
65/157478830;chr7:4820/chr7/157481550/157481759;chr7:5168/chr7/158937479/158937576;chr8:13/chr8/494
181/494828;chr8:33/chr8/638208/638418;chr8:37/chr8/686885/687162;chr8:38/chr8/687290/687513;chr8:39/ch
r8/687642/687837;chr8:40/chr8/688020/688402;chr8:42/chr8/688740/689295;chr8:96/chr8/876824/877094;chr8:
263/chr8/1443908/1444164;chr8:354/chr8/1950230/1950518;chr8:565/chr8/8559652/8559956;chr8:594/chr8/9
764050/9764195;chr8:650/chr8/10587603/10587893;chr8:651/chr8/10588008/10588184;chr8:652/chr8/105882
93/10588608;chr8:653/chr8/10588950/10589092;chr8:656/chr8/10590020/10590289;chr8:728/chr8/11537698/1
1538007;chr8:738/chr8/11559795/11560067;chr8:766/chr8/12809061/12809462;chr8:791/chr8/15397660/1539
7991;chr8:809/chr8/17270826/17271090;chr8:940/chr8/21647110/21647266;chr8:941/chr8/21647456/2164774
6;chr8:1006/chr8/22408759/22409076;chr8:1018/chr8/22446721/22446902;chr8:1033/chr8/22548249/2254840
2;chr8:1101/chr8/23584401/23584581;chr8:1107/chr8/24771125/24771349;chr8:1276/chr8/31497961/3149829
7;chr8:1309/chr8/35092703/35093036;chr8:1349/chr8/37555619/37555753;chr8:1350/chr8/37555912/3755610
4;chr8:1403/chr8/38757652/38757878;chr8:1405/chr8/38831868/38832210;chr8:1408/chr8/38964944/3896532
1;chr8:1695/chr8/53852184/53852565;chr8:1696/chr8/53852914/53853051;chr8:1701/chr8/54163350/5416367
3;chr8:1716/chr8/54789806/54790022;chr8:1720/chr8/54791946/54792184;chr8:1738/chr8/55372068/5537223
6;chr8:1742/chr8/55379457/55379837;chr8:1744/chr8/55382803/55383182;chr8:1752/chr8/56014744/5601503
4;chr8:1788/chr8/57358147/57358464;chr8:1789/chr8/57358662/57358806;chr8:1876/chr8/65282005/6528218
7;chr8:1878/chr8/65282524/65282712;chr8:1893/chr8/65493579/65493806;chr8:1921/chr8/67873422/6787365
5;chr8:1959/chr8/70946915/70947090;chr8:1962/chr8/70981880/70982154;chr8:1971/chr8/72459613/7246029
9;chr8:2051/chr8/80804108/80804323;chr8:2113/chr8/91803720/91804064;chr8:2179/chr8/97157210/9715741
2;chr8:2181/chr8/97157924/97158021;chr8:2236/chr8/99952304/99952532;chr8:2241/chr8/99960498/9996092
1;chr8:2251/chr8/99986044/99986225;chr8:2284/chr8/102505986/102506365;chr8:2423/chr8/120220606/1202
20895;chr8:2717/chr8/139509128/139509450;chr8:2786/chr8/140716022/140716328;chr8:2963/chr8/14242807
4/142428340;chr8:3309/chr8/143545510/143545847;chr8:3322/chr8/143572961/143573153;chr8:3527/chr8/14
4358144/144358360;chr8:3611/chr8/144810477/144810542;chr8:3689/chr8/145052074/145052253;chr8:3701/
chr8/145103842/145104436;chr8:3702/chr8/145105416/145105684;chr8:3703/chr8/145105890/145106676;chr
8:3705/chr8/145106972/145107072;chr8:3759/chr8/145697983/145698667;chr8:3776/chr8/145806272/145806
619;chr9:4/chr9/113513/113549;chr9:47/chr9/976690/976911;chr9:55/chr9/1045628/1045794;chr9:58/chr9/105
0173/1050390;chr9:60/chr9/1051639/1051904;chr9:135/chr9/8857486/8857685;chr9:187/chr9/17134846/17134
993;chr9:193/chr9/17579292/17579402;chr9:207/chr9/19127361/19127549;chr9:239/chr9/23821734/23822017;
chr9:343/chr9/34809764/34810089;chr9:376/chr9/35675648/35675837;chr9:402/chr9/36739634/36739811;chr9:
431/chr9/37002518/37002723;chr9:629/chr9/79635449/79635745;chr9:631/chr9/79637889/79638136;chr9:948/
chr9/94712080/94712294;chr9:1070/chr9/96714034/96714479;chr9:1073/chr9/96715373/96715687;chr9:1080/
chr9/96720886/96721102;chr9:1081/chr9/96721468/96721688;chr9:1083/chr9/96722663/96722862;chr9:1173/
chr9/98981562/98981682;chr9:1188/chr9/99482242/99482542;chr9:1218/chr9/100610906/100611124;chr9:122
5/chr9/100616098/100616270;chr9:1226/chr9/100616469/100617285;chr9:1287/chr9/102590760/102590938;c
hr9:1343/chr9/110250215/110250497;chr9:1374/chr9/112081334/112081563;chr9:1388/chr9/113341848/11334
1926;chr9:1427/chr9/116225742/116226119;chr9:1535/chr9/120507295/120507466;chr9:1682/chr9/126135610/
126135979;chr9:1702/chr9/126773780/126773939;chr9:1705/chr9/126774792/126775213;chr9:1708/chr9/126
777747/126777928;chr9:1715/chr9/126780044/126780284;chr9:1770/chr9/127265610/127265875;chr9:1878/c
hr9/129377352/129377592;chr9:1941/chr9/130461571/130461686;chr9:1956/chr9/130516521/130516802;chr9:
1980/chr9/130689450/130689630;chr9:2117/chr9/132382355/132382634;chr9:2143/chr9/132650763/13265102
5;chr9:2223/chr9/133540232/133540453;chr9:2352/chr9/134430193/134430276;chr9:2443/chr9/135462208/13
5462395;chr9:2530/chr9/136293629/136293841;chr9:2786/chr9/137347895/137348054;chr9:2923/chr9/137967
364/137967472;chr9:3136/chr9/138606249/138606523;chr9:3185/chr9/138674794/138675137;chr9:3255/chr9/
139024521/139024749;chr9:3295/chr9/139093450/139093772;chr9:3297/chr9/139094733/139095014;chr9:349
7/chr9/139715867/139716404;chr9:3504/chr9/139739197/139739297;chr9:3508/chr9/139740650/139740877;c
hr9:3509/chr9/139741288/139741540;chr9:3596/chr9/140033627/140033762;chr9:3751/chr9/140680995/14068
1409;chrX:27/chrX/334496/334693;chrX:132/chrX/933732/933992;chrX:396/chrX/12156923/12156990;chrX:50
3/chrX/21676168/21676438;chrX:504/chrX/21676563/21676656;chrX:537/chrX/25020597/25020805;chrX:666/c
hrX/39864556/39865040;chrX:678/chrX/39949248/39949745;chrX:693/chrX/40004992/40005424;chrX:784/chr
X/47433504/47433757;chrX:810/chrX/48684899/48685724;chrX:1246/chrX/99663657/99663802;chrX:1339/chr
X/108868335/108868474;chrX:1560/chrX/133684807/133685051;chrX:1756/chrX/150863411/150863573;chrX:
1761/chrX/151142882/151143101;chrY:18/chrY/7141863/7142122

TABLE 2
chr1/1362151/1362490/chr1:910;chr1/1369570/1370068/chr1:925;chr1/1475163/1475494/chr1:1018;chr1/1564
455/1565143/chr1:1116;chr1/1564455/1565143/chr1:1116;chr1/1564455/1565143/chr1:1116;chr1/1830655/183
0795/chr1:1274;chr1/2080122/2080394/chr1:1594;chr1/2231795/2232310/chr1:1731;chr1/2705890/2705935/ch
r1:2426;chr1/3454818/3454991/chr1:4330;chr1/3567271/3567590/chr1:4499;chr1/3567271/3567590/chr1:4499;
chr1/3595087/3595205/chr1:4556;chr1/6569441/6569670/chr1:8311;chr1/10948524/10948737/chr1:11907;chr1/
13910785/13910996/chr1:14264;chr1/17446428/17446468/chr1:16499;chr1/18958207/18958318/chr1:18173;c
hr1/18958207/18958318/chr1:18173;chr1/19600483/19600729/chr1:18701;chr1/21619976/21620270/chr1:1997
2;chr1/21754735/21754862/chr1:20054;chr1/22150069/22150464/chr1:20290;chr1/23279738/23280152/chr1:2
0982;chr1/24229453/24229473/chr1:21457;chr1/24514556/24514763/chr1:21620;chr1/26097990/26098102/chr
1:22540;chr1/27159834/27160220/chr1:23197;chr1/27687297/27687463/chr1:23491;chr1/27687297/27687463/
chr1:23491;chr1/32237536/32238659/chr1:26783;chr1/32716772/32716888/chr1:27028;chr1/34642382/346425
55/chr1:28244;chr1/36028848/36029038/chr1:29452;chr1/36787355/36787413/chr1:29780;chr1/40236970/402
37021/chr1:33168;chr1/40426119/40426244/chr1:33307;chr1/43533791/43534323/chr1:35016;chr1/44031248/
44031805/chr1:35215;chr1/45275896/45275995/chr1:35807;chr1/46632274/46632996/chr1:36254;chr1/540408
43/54041029/chr1:40129;chr1/54941110/54941446/chr1:40507;chr1/63787249/63787461/chr1:44946;chr1/657
31468/65731915/chr1:45729;chr1/67773922/67774123/chr1:46521;chr1/87597973/87598463/chr1:57617;chr1/
91192577/91192791/chr1:59252;chr1/91192577/91192791/chr1:59252;chr1/91306962/91307009/chr1:59355;c
hr1/110612669/110612826/chr1:70099;chr1/110612669/110612826/chr1:70099;chr1/113286995/113287154/ch
r1:71764;chr1/119526993/119527544/chr1:74779;chr1/119526993/119527544/chr1:74779;chr1/119527718/119
527825/chr1:74780;chr1/119530143/119530243/chr1:74786;chr1/119532021/119532194/chr1:74790;chr1/1195
32773/119533069/chr1:74792;chr1/119550936/119551175/chr1:74822;chr1/120906033/120906339/chr1:75227;
chr1/151810460/151810772/chr1:78216;chr1/151810460/151810772/chr1:78216;chr1/151810886/151811540/
chr1:78217;chr1/151810886/151811540/chr1:78217;chr1/154475268/154475330/chr1:79838;chr1/156862708/1
56863308/chr1:81300;chr1/156863415/156863709/chr1:81301;chr1/156863415/156863709/chr1:81301;chr1/16
1038973/161039694/chr1:84750;chr1/180202382/180203142/chr1:94606;chr1/180202382/180203142/chr1:946
06;chr1/180204498/180204795/chr1:94610;chr1/180204498/180204795/chr1:94610;chr1/182025825/18202595
9/chr1:95677;chr1/182921856/182921912/chr1:96009;chr1/182922062/182922174/chr1:96010;chr1/197887676/
197887784/chr1:104446;chr1/200842542/200843206/chr1:105831;chr1/201708887/201709532/chr1:106285;c
hr1/202130663/202130966/chr1:106485;chr1/202168501/202168757/chr1:106517;chr1/203044923/203045258/
chr1:106992;chr1/203044923/203045258/chr1:106992;chr1/203044923/203045258/chr1:106992;chr1/2046534
56/204653670/chr1:107956;chr1/209404922/209405233/chr1:110626;chr1/212688031/212688332/chr1:112342;
chr1/212688031/212688332/chr1:112342;chr1/217310297/217310421/chr1:114639;chr1/221049969/22105011
5/chr1:116503;chr1/225654936/225655183/chr1:118864;chr1/225655594/225655776/chr1:118866;chr1/226613
283/226613688/chr1:119294;chr1/229542753/229543124/chr1:120842;chr1/229542753/229543124/chr1:12084
2;chr1/231296446/231296828/chr1:122207;chr1/231296446/231296828/chr1:122207;chr1/235586791/2355869
01/chr1:124682;chr10/1778903/1779261/chr10:1756;chr10/7449577/7449896/chr10:7545;chr10/8075813/8075
974/chr10:7871;chr10/8076091/8076417/chr10:7872;chr10/8076091/8076417/chr10:7872;chr10/8090398/8090
524/chr10:7905;chr10/11207431/11207689/chr10:10698;chr10/11207431/11207689/chr10:10698;chr10/112074
31/11207689/chr10:10698;chr10/22542297/22542380/chr10:18840;chr10/23482254/23482428/chr10:19329;chr
10/26500995/26501046/chr10:21693;chr10/35928211/35928712/chr10:26395;chr10/35928896/35928953/chr10:
26396;chr10/43429116/43429442/chr10:29126;chr10/49892740/49892954/chr10:32627;chr10/77156080/7715
6191/chr10:49397;chr10/81742979/81743380/chr10:52751;chr10/88296200/88296314/chr10:58339;chr10/8829
6422/88296712/chr10:58340;chr10/88296422/88296712/chr10:58340;chr10/88438958/88439043/chr10:58403;
chr10/94450625/94451827/chr10:61217;chr10/94450625/94451827/chr10:61217;chr10/94451928/94451992/ch
r10:61218;chr10/94825896/94825954/chr10:61360;chr10/94835205/94835386/chr10:61364;chr10/102892565/1
02892633/chr10:65984;chr10/103534322/103534488/chr10:66305;chr10/103535661/103536004/chr10:66310;c
hr10/105344355/105344542/chr10:67145;chr10/110225994/110226376/chr10:72252;chr10/111216604/111216
677/chr10:73103;chr10/118891689/118891759/chr10:78180;chr10/118900240/118900277/chr10:78195;chr10/1
21300969/121301307/chr10:80075;chr10/121300969/121301307/chr10:80075;chr10/123922703/123922731/ch
r10:81707;chr10/123923178/123923629/chr10:81709;chr10/123923178/123923629/chr10:81709;chr10/123923
771/123924254/chr10:81710;chr10/125651285/125651525/chr10:83024;chr10/126135809/126136050/chr10:83
283;chr10/126223218/126223262/chr10:83347;chr10/126840822/126841011/chr10:83631;chr10/130508374/13
0508569/chr10:86629;chr10/134000464/134001032/chr10:92085;chr10/134000464/134001032/chr10:92085;ch
r10/134000464/134001032/chr10:92085;chr10/134000464/134001032/chr10:92085;chr10/134357813/1343581
74/chr10:92595;chr11/415261/415621/chr11:259;chr11/626576/627510/chr11:428;chr11/626576/627510/chr11:
428;chr11/626576/627510/chr11:428;chr11/636988/637191/chr11:435;chr11/637329/637874/chr11:436;chr11/6
37329/637874/chr11:436;chr11/637329/637874/chr11:436;chr11/639470/639835/chr11:437;chr11/639954/6402
72/chr11:438;chr11/720490/720942/chr11:482;chr11/720490/720942/chr11:482;chr11/720490/720942/chr11:48
2;chr11/725615/725807/chr11:489;chr11/725615/725807/chr11:489;chr11/1779712/1779972/chr11:2023;chr11/
1873925/1874469/chr11:2166;chr11/1910395/1910519/chr11:2210;chr11/1910627/1911057/chr11:2211;chr11/
2883553/2884171/chr11:3216;chr11/2891153/2891178/chr11:3224;chr11/3150308/3150439/chr11:3466;chr11/
9112508/9112702/chr11:7541;chr11/14926953/14926984/chr11:9705;chr11/14927196/14927368/chr11:9707;c
hr11/16632058/16632416/chr11:10457;chr11/19264030/19264095/chr11:11957;chr11/20618888/20619024/chr
11:12594;chr11/22454316/22454382/chr11:14158;chr11/31839928/31840018/chr11:20769;chr11/31840660/31
841216/chr11:20771;chr11/47416141/47416634/chr11:32772;chr11/60718476/60718969/chr11:40818;chr11/61
322897/61322944/chr11:41211;chr11/61723329/61723400/chr11:41477;chr11/62693938/62694183/chr11:4222
7;chr11/63974368/63974719/chr11:43046;chr11/64108022/64108251/chr11:43147;chr11/64108022/64108251/
chr11:43147;chr11/65313877/65314032/chr11:44026;chr11/65313877/65314032/chr11:44026;chr11/65408358/
65408898/chr11:44094;chr11/65661460/65661570/chr11:44327;chr11/66624890/66624939/chr11:44938;chr11/
67164679/67164799/chr11:45215;chr11/67171014/67171199/chr11:45223;chr11/67176901/67177120/chr11:45
235;chr11/67176901/67177120/chr11:45235;chr11/67176901/67177120/chr11:45235;chr11/67414130/6741447
9/chr11:45465;chr11/68847931/68848056/chr11:46495;chr11/69919937/69920113/chr11:47246;chr11/7025698
6/70257176/chr11:47406;chr11/70278205/70278278/chr11:47424;chr11/70508152/70508658/chr11:47557;chr1
1/76032790/76033382/chr11:50007;chr11/94473595/94473987/chr11:59990;chr11/94770846/94771101/chr11:
60094;chr11/111093651/111093897/chr11:69530;chr11/111783442/111783600/chr11:69878;chr11/116371471/
116371540/chr11:73717;chr11/124629401/124629621/chr11:80450;chr11/124735322/124735411/chr11:80531;
chr11/125036324/125036457/chr11:80676;chr11/129242392/129242675/chr11:85119;chr11/131780380/13178
0533/chr11:87139;chr11/131781045/131781370/chr11:87141;chr11/132953069/132953147/chr11:88839;chr11/
133994774/133994914/chr11:90512;chr12/312736/313096/chr12:270;chr12/662788/662960/chr12:455;chr12/1
756220/1756344/chr12:896;chr12/2393217/2393554/chr12:1364;chr12/2800420/2800664/chr12:1587;chr12/28
00420/2800664/chr12:1587;chr12/2903453/2903531/chr12:1688;chr12/3309931/3310301/chr12:1891;chr12/61
84504/6184741/chr12:3862;chr12/6427770/6427847/chr12:4070;chr12/7060367/7061427/chr12:4519;chr12/70
61550/7061715/chr12:4520;chr12/7067956/7068210/chr12:4531;chr12/8025364/8025803/chr12:5141;chr12/80
25364/8025803/chr12:5141;chr12/8025364/8025803/chr12:5141;chr12/22487006/22487306/chr12:13815;chr12/
25055380/25055872/chr12:15769;chr12/25055985/25056160/chr12:15770;chr12/30322960/30323020/chr12:1
8141;chr12/34260676/34261176/chr12:20077;chr12/51717537/51717922/chr12:27049;chr12/52644089/526443
80/chr12:27804;chr12/52652267/52652341/chr12:27808;chr12/52652454/52652537/chr12:27809;chr12/540885
35/54088968/chr12:28935;chr12/54338742/54338951/chr12:29164;chr12/54409211/54409267/chr12:29251;chr
12/54423548/54423710/chr12:29267;chr12/54424627/54424963/chr12:29270;chr12/54424627/54424963/chr12:
29270;chr12/54428282/54428663/chr12:29273;chr12/54428282/54428663/chr12:29273;chr12/54811864/5481
2113/chr12:29501;chr12/57618538/57618942/chr12:31789;chr12/57618538/57618942/chr12:31789;chr12/8110
1788/81101900/chr12:46014;chr12/81102034/81102200/chr12:46015;chr12/85672277/85672402/chr12:49063;
chr12/111847251/111847387/chr12:64298;chr12/114834134/114834256/chr12:66791;chr12/114846822/11484
6948/chr12:66816;chr12/114847527/114847629/chr12:66817;chr12/115102537/115102918/chr12:67067;chr12/
115103155/115104295/chr12:67069;chr12/115103155/115104295/chr12:67069;chr12/115103155/115104295/c
hr12:67069;chr12/115104848/115105484/chr12:67071;chr12/115104848/115105484/chr12:67071;chr12/11510
9640/115110037/chr12:67076;chr12/115109640/115110037/chr12:67076;chr12/115123149/115123483/chr12:6
7087;chr12/115123149/115123483/chr12:67087;chr12/115124686/115125224/chr12:67091;chr12/115173215/1
15173938/chr12:67149;chr12/120032389/120032522/chr12:70924;chr12/121530597/121530897/chr12:71725;c
hr12/122016572/122016668/chr12:71954;chr12/122227752/122228315/chr12:72119;chr12/122230877/122231
185/chr12:72126;chr12/122442162/122442462/chr12:72253;chr12/122669142/122669439/chr12:72395;chr12/1
23518598/123518703/chr12:72774;chr12/124781191/124781369/chr12:73584;chr12/124941722/124941910/ch
r12:73651;chr12/125039218/125039478/chr12:73704;chr12/130388702/130388773/chr12:81010;chr12/130388
702/130388773/chr12:81010;chr12/130647935/130648847/chr12:81367;chr12/130647935/130648847/chr12:81
367;chr12/130647935/130648847/chr12:81367;chr12/130647935/130648847/chr12:81367;chr12/130647935/13
0648847/chr12:81367;chr12/130647935/130648847/chr12:81367;chr12/130647935/130648847/chr12:81367;ch
r12/130648983/130649264/chr12:81368;chr12/132337575/132337658/chr12:83914;chr12/132381543/1323817
82/chr12:83961;chr12/132906202/132906398/chr12:84438;chr12/133021467/133021706/chr12:84684;chr13/21
520154/21520551/chr13:1827;chr13/23500738/23501465/chr13:2889;chr13/24839234/24839454/chr13:3848;c
hr13/25506171/25506339/chr13:4241;chr13/26586648/26586932/chr13:4985;chr13/28370464/28370525/chr13:
6364;chr13/28493315/28493426/chr13:6530;chr13/28501983/28502043/chr13:6545;chr13/47012284/47012436/
chr13:17668;chr13/50701411/50701867/chr13:19654;chr13/50706829/50707124/chr13:19660;chr13/50707538/
50707743/chr13:19662;chr13/50707538/50707743/chr13:19662;chr13/95354896/95355135/chr13:57624;chr13/
95354896/95355135/chr13:57624;chr13/96294429/96294637/chr13:58509;chr13/100310204/100311032/chr13:
60894;chr13/100547539/100548456/chr13:61035;chr13/100547539/100548456/chr13:61035;chr13/100547539/
100548456/chr13:61035;chr13/100620241/100620554/chr13:61109;chr13/100622079/100622093/chr13:61112;
chr13/100641680/100641899/chr13:61131;chr13/100643761/100643791/chr13:61137;chr13/100649622/10064
9799/chr13:61140;chr13/100649911/100650222/chr13:61141;chr13/102568810/102568923/chr13:62023;chr13/
109792746/109793137/chr13:69578;chr13/109792746/109793137/chr13:69578;chr13/109793269/109793379/c
hr13:69579;chr13/110950743/110950812/chr13:70252;chr13/111719002/111719171/chr13:70691;chr13/11254
8012/112548105/chr13:71605;chr13/112710293/112710427/chr13:71891;chr13/112710562/112710853/chr13:7
1892;chr13/112711361/112711613/chr13:71894;chr13/112717195/112717377/chr13:71911;chr13/112721711/1
12721794/chr13:71921;chr13/112721942/112722094/chr13:71922;chr13/112726293/112726465/chr13:71929;c
hr13/112758598/112759112/chr13:71963;chr13/112758598/112759112/chr13:71963;chr13/112759905/112760
087/chr13:71966;chr13/114932211/114932339/chr13:74756;chr14/21091033/21091491/chr14:1037;chr14/2109
2115/21092183/chr14:1038;chr14/24601611/24601869/chr14:4094;chr14/24641229/24641404/chr14:4110;chr1
4/24779828/24780851/chr14:4166;chr14/29254416/29254621/chr14:8618;chr14/29254416/29254621/chr14:86
18;chr14/34269830/34269915/chr14:11353;chr14/37053189/37053429/chr14:12842;chr14/37053189/37053429/
chr14:12842;chr14/37131997/37132554/chr14:12902;chr14/37135513/37135987/chr14:12907;chr14/37136098/
37136346/chr14:12908;chr14/37136098/37136346/chr14:12908;chr14/38060856/38061016/chr14:13797;chr14/
38067835/38067988/chr14:13810;chr14/38725360/38725529/chr14:14475;chr14/45381268/45381711/chr14:2
0066;chr14/52734955/52735069/chr14:25597;chr14/52735420/52735567/chr14:25599;chr14/54686034/546867
07/chr14:26279;chr14/54686034/54686707/chr14:26279;chr14/57261408/57261631/chr14:27756;chr14/572614
08/57261631/chr14:27756;chr14/57261756/57262025/chr14:27757;chr14/57264609/57264918/chr14:27762;chr
14/57264609/57264918/chr14:27762;chr14/57265460/57265539/chr14:27765;chr14/57270914/57271214/chr14:
27770;chr14/57270914/57271214/chr14:27770;chr14/60982558/60982691/chr14:30223;chr14/61103912/6110
4315/chr14:30325;chr14/61104451/61104661/chr14:30326;chr14/73180974/73181293/chr14:35585;chr14/7371
2213/73712414/chr14:35748;chr14/74101076/74101141/chr14:35888;chr14/74981396/74981616/chr14:36307;
chr14/77736867/77737161/chr14:38034;chr14/91287359/91287583/chr14:48657;chr14/93022169/93022311/ch
r14:49730;chr14/95235401/95235539/chr14:51665;chr14/95237662/95237983/chr14:51668;chr14/95826716/95
826939/chr14:52052;chr14/97093479/97093525/chr14:53073;chr14/101924168/101924293/chr14:58757;chr14/
101924419/101924564/chr14:58758;chr14/103389888/103390183/chr14:59703;chr14/103568956/103568982/c
hr14:59807;chr14/103740306/103740714/chr14:59940;chr14/103745833/103746148/chr14:59942;chr14/10374
5833/103746148/chr14:59942;chr14/105527220/105527664/chr14:62194;chr14/105527220/105527664/chr14:6
2194;chr14/105888382/105888765/chr14:62461;chr14/105888382/105888765/chr14:62461;chr14/105944677/1
05944743/chr14:62497;chr15/20499795/20500710/chr15:242;chr15/26107480/26107782/chr15:3677;chr15/271
13169/27113239/chr15:4764;chr15/29033895/29033947/chr15:6658;chr15/29034556/29034805/chr15:6660;chr
15/30517493/30517588/chr15:7682;chr15/31727074/31727382/chr15:8312;chr15/32605407/32605952/chr15:9
254;chr15/37172556/37172678/chr15:11520;chr15/37389383/37389685/chr15:11604;chr15/37390188/3739028
8/chr15:11607;chr15/41217728/41218050/chr15:13757;chr15/41794708/41795295/chr15:13969;chr15/4179470
8/41795295/chr15:13969;chr15/41794708/41795295/chr15:13969;chr15/41803519/41804754/chr15:13976;chr1
5/41803519/41804754/chr15:13976;chr15/53093094/53093493/chr15:18461;chr15/53093094/53093493/chr15:
18461;chr15/53097869/53097985/chr15:18470;chr15/53098107/53098456/chr15:18471;chr15/60297884/60297
932/chr15:22825;chr15/65116033/65116193/chr15:25762;chr15/65688922/65689360/chr15:26026;chr15/68851
465/68851534/chr15:27484;chr15/74429663/74429805/chr15:31086;chr15/76630511/76630659/chr15:32290;c
hr15/76634720/76635202/chr15:32302;chr15/76634720/76635202/chr15:32302;chr15/77288814/77289046/chr
15:32444;chr15/79123038/79123313/chr15:33594;chr15/79381804/79381850/chr15:33715;chr15/88800985/88
801136/chr15:40067;chr15/89920854/89921235/chr15:41166;chr15/89920854/89921235/chr15:41166;chr15/89
920854/89921235/chr15:41166;chr15/89922271/89922327/chr15:41167;chr15/89949311/89949671/chr15:4118
4;chr15/89949311/89949671/chr15:41184;chr15/89951464/89951622/chr15:41192;chr15/89951965/89952527/
chr15:41194;chr15/90774299/90774778/chr15:41596;chr15/93592143/93592359/chr15:44598;chr15/93616825/
93617134/chr15:44610;chr15/96884272/96885023/chr15:45832;chr15/96902737/96902846/chr15:45874;chr15/
96908794/96910753/chr15:45890;chr15/96911457/96912424/chr15:45892;chr15/96912891/96912960/chr15:45
894;chr15/96951691/96952169/chr15:45910;chr15/101513277/101513644/chr15:49270;chr15/101513277/1015
13644/chr15:49270;chr15/101513277/101513644/chr15:49270;chr15/101991827/101991942/chr15:49533;chr1
6/375242/375429/chr16:220;chr16/1203996/1204053/chr16:1429;chr16/2557412/2557497/chr16:2818;chr16/11
326816/11327384/chr16:12066;chr16/14397377/14397655/chr16:14618;chr16/14397778/14397915/chr16:1461
9;chr16/23706241/23706536/chr16:21325;chr16/29160128/29160605/chr16:27230;chr16/29675696/29676499/
chr16:27687;chr16/29675696/29676499/chr16:27687;chr16/30195448/30195758/chr16:28073;chr16/30484943/
30485169/chr16:28192;chr16/31075642/31075996/chr16:28562;chr16/33852977/33853622/chr16:30088;chr16/
49314761/49314896/chr16:32667;chr16/49872457/49872979/chr16:33144;chr16/49872457/49872979/chr16:33
144;chr16/50307937/50308652/chr16:33364;chr16/50715134/50715410/chr16:33521;chr16/51168302/5116843
3/chr16:33899;chr16/54611546/54611830/chr16:36658;chr16/54966651/54966709/chr16:36806;chr16/5766348
0/57663912/chr16:38765;chr16/65156845/65156992/chr16:46615;chr16/66462124/66462423/chr16:47822;chr1
6/66612664/66613368/chr16:47903;chr16/66612664/66613368/chr16:47903;chr16/67199629/67199743/chr16:
48158;chr16/67199629/67199743/chr16:48158;chr16/67199853/67199986/chr16:48159;chr16/67199853/67199
986/chr16:48159;chr16/67428474/67428777/chr16:48271;chr16/67428883/67429159/chr16:48272;chr16/68390
077/68390872/chr16:48693;chr16/70771490/70771858/chr16:49783;chr16/72821080/72821436/chr16:51214;c
hr16/73099971/73100184/chr16:51363;chr16/73099971/73100184/chr16:51363;chr16/85436723/85436872/chr
16:60934;chr16/85482199/85482903/chr16:60969;chr16/86544675/86544950/chr16:62320;chr16/86544675/86
544950/chr16:62320;chr16/86544675/86544950/chr16:62320;chr16/86612933/86613031/chr16:62392;chr16/88
758409/88758569/chr16:65381;chr16/88766739/88767518/chr16:65392;chr16/88769383/88770591/chr16:6539
7;chr16/88812231/88812447/chr16:65431;chr16/89044989/89045022/chr16:65834;chr16/89789006/89789812/
chr16:66818;chr16/90075489/90075761/chr16:67015;chr17/943291/943384/chr17:999;chr17/1160026/1160310/
chr17:1303;chr17/1173973/1174384/chr17:1314;chr17/1173973/1174384/chr17:1314;chr17/1959355/1960091/
chr17:1996;chr17/1960540/1961482/chr17:1999;chr17/1960540/1961482/chr17:1999;chr17/1960540/1961482/
chr17:1999;chr17/2839062/2839216/chr17:2615;chr17/3438921/3439100/chr17:3270;chr17/3814690/3814963/
chr17:3589;chr17/3819295/3819476/chr17:3594;chr17/4803470/4803791/chr17:4290;chr17/4804169/4804321/
chr17:4291;chr17/5487112/5487267/chr17:4715;chr17/5783170/5783321/chr17:4912;chr17/5800829/5801072/
chr17:4923;chr17/6945866/6946175/chr17:6279;chr17/7077418/7077906/chr17:6388;chr17/7240012/7240105/
chr17:6501;chr17/7341478/7341615/chr17:6617;chr17/7350281/7350422/chr17:6628;chr17/7942502/7942893/
chr17:7021;chr17/7975744/7975931/chr17:7053;chr17/12876973/12877815/chr17:11258;chr17/12876973/1287
7815/chr17:11258;chr17/12876973/12877815/chr17:11258;chr17/15820655/15821098/chr17:12841;chr17/1729
5317/17295718/chr17:13762;chr17/27943684/27944078/chr17:18153;chr17/32964499/32965031/chr17:21612;
chr17/33672620/33672971/chr17:22341;chr17/36104338/36105581/chr17:23923;chr17/36104338/36105581/ch
r17:23923;chr17/36717904/36717999/chr17:24289;chr17/37307985/37308082/chr17:24659;chr17/38334264/38
334751/chr17:25207;chr17/40440835/40441569/chr17:26391;chr17/40440835/40441569/chr17:26391;chr17/40
821935/40822927/chr17:26581;chr17/40821935/40822927/chr17:26581;chr17/40825733/40825840/chr17:2658
6;chr17/40825733/40825840/chr17:26586;chr17/43037172/43037499/chr17:27980;chr17/43198257/43198771/
chr17:28085;chr17/43198257/43198771/chr17:28085;chr17/43198257/43198771/chr17:28085;chr17/43221565/
43221593/chr17:28100;chr17/44846903/44847450/chr17:29242;chr17/46646010/46646043/chr17:30464;chr17/
46647721/46647907/chr17:30465;chr17/46663647/46663942/chr17:30478;chr17/46669643/46669915/chr17:30
489;chr17/46670024/46670107/chr17:30490;chr17/46915331/46915460/chr17:30721;chr17/47302293/4730235
0/chr17:30992;chr17/48042078/48043118/chr17:31431;chr17/48042078/48043118/chr17:31431;chr17/4854611
1/48546512/chr17:31818;chr17/48546111/48546512/chr17:31818;chr17/48546619/48547082/chr17:31819;chr1
7/55123208/55123987/chr17:37192;chr17/55123208/55123987/chr17:37192;chr17/55951927/55952247/chr17:
37573;chr17/56410216/56410519/chr17:37988;chr17/56564865/56565663/chr17:38121;chr17/56564865/56565
663/chr17:38121;chr17/56564865/56565663/chr17:38121;chr17/56564865/56565663/chr17:38121;chr17/56564
865/56565663/chr17:38121;chr17/59481673/59482955/chr17:39251;chr17/59481673/59482955/chr17:39251;c
hr17/59481673/59482955/chr17:39251;chr17/59485485/59485688/chr17:39254;chr17/59529124/59529366/chr
17:39274;chr17/59532563/59532880/chr17:39282;chr17/61512340/61512792/chr17:40085;chr17/61778275/61
778957/chr17:40321;chr17/61778275/61778957/chr17:40321;chr17/62097845/62098021/chr17:40630;chr17/73
073809/73073887/chr17:48787;chr17/73749586/73750133/chr17:49272;chr17/73749586/73750133/chr17:4927
2;chr17/73749586/73750133/chr17:49272;chr17/73749586/73750133/chr17:49272;chr17/74070524/74070599/
chr17:49518;chr17/74117922/74118119/chr17:49546;chr17/74118230/74118311/chr17:49547;chr17/74136412/
74136500/chr17:49564;chr17/74994406/74994570/chr17:50255;chr17/75370153/75370205/chr17:50533;chr17/
75372356/75372767/chr17:50539;chr17/76127034/76127922/chr17:51707;chr17/76127034/76127922/chr17:51
707;chr17/77751046/77751088/chr17:53744;chr17/77789377/77789840/chr17:53782;chr17/77789377/7778984
0/chr17:53782;chr17/77789377/77789840/chr17:53782;chr17/77814197/77814304/chr17:53802;chr17/7791673
2/77916954/chr17:53874;chr17/78992444/78992563/chr17:54585;chr17/79315186/79315908/chr17:54860;chr1
7/79315186/79315908/chr17:54860;chr17/79315186/79315908/chr17:54860;chr17/79316375/79316989/chr17:
54862;chr17/79450367/79450424/chr17:55083;chr17/79620489/79620665/chr17:55198;chr17/80057302/80057
545/chr17:55526;chr17/80943940/80943999/chr17:56277;chr17/81147353/81147508/chr17:56508;chr18/10032
400/10032969/chr18:6343;chr18/10032400/10032969/chr18:6343;chr18/12254751/12254869/chr18:8797;chr18/
12911287/12911613/chr18:9184;chr18/12911287/12911613/chr18:9184;chr18/12911287/12911613/chr18:918
4;chr18/12911287/12911613/chr18:9184;chr18/13136145/13136425/chr18:9249;chr18/14748156/14748450/chr
18:10861;chr18/14748156/14748450/chr18:10861;chr18/14748156/14748450/chr18:10861;chr18/14999432/14
999523/chr18:10974;chr18/31803614/31803759/chr18:19568;chr18/45058208/45058295/chr18:31262;chr18/46
361057/46361418/chr18:31851;chr18/55019905/55019959/chr18:37805;chr18/55094803/55095319/chr18:3790
7;chr18/55095482/55096174/chr18:37908;chr18/55095482/55096174/chr18:37908;chr18/55095482/55096174/
chr18:37908;chr18/55103169/55103433/chr18:37928;chr18/55103602/55103738/chr18:37929;chr18/55107865/
55107886/chr18:37942;chr18/56935445/56935577/chr18:38909;chr18/70536114/70536532/chr18:51967;chr18/
70536114/70536532/chr18:51967;chr18/76733786/76733857/chr18:60480;chr18/77159349/77159419/chr18:60
720;chr18/77397574/77397817/chr18:61213;chr18/77397574/77397817/chr18:61213;chr18/77547953/7754815
5/chr18:61351;chr18/77547953/77548155/chr18:61351;chr19/681322/681892/chr19:695;chr19/681322/681892/
chr19:695;chr19/695454/695563/chr19:714;chr19/695761/695878/chr19:715;chr19/709772/709937/chr19:737;c
hr19/863768/863877/chr19:973;chr19/947650/947711/chr19:1062;chr19/1068360/1068762/chr19:1215;chr19/1
068360/1068762/chr19:1215;chr19/1088234/1088633/chr19:1250;chr19/1132860/1133000/chr19:1294;chr19/1
214133/1214309/chr19:1372;chr19/1363421/1363619/chr19:1563;chr19/1467329/1467398/chr19:1652;chr19/1
855611/1855711/chr19:2248;chr19/1966993/1967352/chr19:2356;chr19/2239836/2240268/chr19:2551;chr19/3
136339/3136709/chr19:3582;chr19/3136339/3136709/chr19:3582;chr19/3178296/3180211/chr19:3636;chr19/3
178296/3180211/chr19:3636;chr19/3178296/3180211/chr19:3636;chr19/3178296/3180211/chr19:3636;chr19/3
178296/3180211/chr19:3636;chr19/3178296/3180211/chr19:3636;chr19/3180319/3180411/chr19:3637;chr19/3
605082/3605239/chr19:4230;chr19/3670917/3671007/chr19:4276;chr19/3671185/3671681/chr19:4277;chr19/3
671783/3672096/chr19:4278;chr19/3950718/3950935/chr19:4734;chr19/4108747/4109297/chr19:4859;chr19/4
543388/4543561/chr19:5308;chr19/6234224/6234309/chr19:7120;chr19/6753333/6753626/chr19:7766;chr19/6
772369/6773097/chr19:7783;chr19/8657676/8657781/chr19:9795;chr19/9473616/9473855/chr19:10645;chr19/
10655643/10655756/chr19:11795;chr19/11253451/11253533/chr19:12176;chr19/11532066/11532221/chr19:12
408;chr19/11785145/11785188/chr19:12612;chr19/12624211/12624564/chr19:12974;chr19/12624211/1262456
4/chr19:12974;chr19/13123020/13123217/chr19:13419;chr19/13215040/13215386/chr19:13579;chr19/1361690
6/13617266/chr19:14187;chr19/14097426/14097579/chr19:14773;chr19/16197073/16197590/chr19:17606;chr1
9/17439581/17439630/chr19:18517;chr19/17889291/17889570/chr19:19186;chr19/18113363/18113567/chr19:
19504;chr19/18402223/18402286/chr19:19820;chr19/33794745/33794972/chr19:29777;chr19/34990900/34991
365/chr19:31007;chr19/34991487/34991990/chr19:31008;chr19/38877229/38877456/chr19:33911;chr19/39228
070/39228317/chr19:34292;chr19/39738337/39738638/chr19:34704;chr19/39738337/39738638/chr19:34704;c
hr19/39738337/39738638/chr19:34704;chr19/39756002/39756142/chr19:34725;chr19/40732229/40732400/chr
19:35463;chr19/40780515/40780792/chr19:35478;chr19/41116456/41116523/chr19:35758;chr19/42828083/42
828110/chr19:37792;chr19/45608025/45608140/chr19:39884;chr19/45662231/45662413/chr19:39923;chr19/45
888797/45889400/chr19:40109;chr19/45899562/45900313/chr19:40118;chr19/45899562/45900313/chr19:4011
8;chr19/46318345/46318671/chr19:40434;chr19/46319243/46319378/chr19:40437;chr19/46997389/46997650/
chr19:41138;chr19/46997774/46998109/chr19:41139;chr19/47152539/47152632/chr19:41309;chr19/47152539/
47152632/chr19:41309;chr19/48048788/48049038/chr19:42058;chr19/48919173/48919323/chr19:42870;chr19/
48919173/48919323/chr19:42870;chr19/48945908/48947360/chr19:42883;chr19/48945908/48947360/chr19:42
883;chr19/48945908/48947360/chr19:42883;chr19/48945908/48947360/chr19:42883;chr19/48945908/4894736
0/chr19:42883;chr19/48945908/48947360/chr19:42883;chr19/48945908/48947360/chr19:42883;chr19/4894590
8/48947360/chr19:42883;chr19/48945908/48947360/chr19:42883;chr19/49263884/49263985/chr19:43144;chr1
9/50058079/50058328/chr19:43919;chr19/51169659/51169792/chr19:45121;chr19/51171368/51171435/chr19:
45124;chr19/52104430/52104969/chr19:46656;chr19/52206690/52206801/chr19:46722;chr19/53966544/53966
573/chr19:47703;chr19/54896046/54896273/chr19:48913;chr19/54976482/54976518/chr19:49026;chr19/55593
207/55593962/chr19:50024;chr19/55593207/55593962/chr19:50024;chr19/55593207/55593962/chr19:50024;c
hr19/55597822/55597916/chr19:50027;chr19/55598140/55598186/chr19:50028;chr19/55765849/55766155/chr
19:50263;chr19/55766832/55767093/chr19:50266;chr19/55896036/55896379/chr19:50417;chr19/58220099/58
220571/chr19:52471;chr19/58867686/58868291/chr19:52906;chr19/58867686/58868291/chr19:52906;chr19/58
867686/58868291/chr19:52906;chr19/58867686/58868291/chr19:52906;chr19/58867686/58868291/chr19:5290
6;chr19/58867686/58868291/chr19:52906;chr19/58908002/58908213/chr19:52949;chr19/58908002/58908213/
chr19:52949;chr2/636653/636940/chr2:745;chr2/636653/636940/chr2:745;chr2/3751088/3751409/chr2:5343;ch
r2/3751088/3751409/chr2:5343;chr2/3751088/3751409/chr2:5343;chr2/8715543/8715853/chr2:10052;chr2/881
6842/8817368/chr2:10123;chr2/10231398/10231780/chr2:10797;chr2/19560698/19561183/chr2:15824;chr2/20
869770/20869861/chr2:16535;chr2/25433406/25433482/chr2:20009;chr2/25499503/25500398/chr2:20054;chr2/
27529715/27529935/chr2:21196;chr2/31805816/31805890/chr2:23778;chr2/31805816/31805890/chr2:23778;c
hr2/38302146/38302381/chr2:28002;chr2/43397997/43398270/chr2:30608;chr2/43397997/43398270/chr2:3060
8;chr2/43451232/43452663/chr2:30651;chr2/45168079/45168250/chr2:31540;chr2/45170446/45170708/chr2:3
1546;chr2/45170446/45170708/chr2:31546;chr2/45227644/45227824/chr2:31626;chr2/45228580/45228639/chr
2:31629;chr2/47206751/47206964/chr2:32641;chr2/47799119/47799129/chr2:32907;chr2/63274639/63275033/
chr2:41614;chr2/63274639/63275033/chr2:41614;chr2/63274639/63275033/chr2:41614;chr2/63278830/632794
22/chr2:41621;chr2/63279839/63280239/chr2:41623;chr2/63279839/63280239/chr2:41623;chr2/63285949/632
86163/chr2:41641;chr2/63286304/63286376/chr2:41642;chr2/63286681/63286768/chr2:41644;chr2/66653857/
66654048/chr2:42793;chr2/66653857/66654048/chr2:42793;chr2/66666351/66666754/chr2:42805;chr2/666663
51/66666754/chr2:42805;chr2/66666351/66666754/chr2:42805;chr2/66672408/66672922/chr2:42814;chr2/666
73028/66673388/chr2:42815;chr2/66673028/66673388/chr2:42815;chr2/66673566/66673729/chr2:42816;chr2/
69001814/69001933/chr2:43990;chr2/71123628/71124082/chr2:45169;chr2/71131120/71132341/chr2:45180;c
hr2/71131120/71132341/chr2:45180;chr2/71134507/71134776/chr2:45187;chr2/72371181/72371262/chr2:4572
9;chr2/74642004/74642321/chr2:46548;chr2/74642004/74642321/chr2:46548;chr2/74642571/74642732/chr2:4
6549;chr2/74726584/74726959/chr2:46585;chr2/74726584/74726959/chr2:46585;chr2/74742186/74742361/chr
2:46600;chr2/85811403/85811635/chr2:55658;chr2/89064603/89064923/chr2:57119;chr2/97193044/97193288/
chr2:59984;chr2/97193044/97193288/chr2:59984;chr2/98698225/98698488/chr2:60664;chr2/102804257/10280
4518/chr2:62517;chr2/105461091/105461164/chr2:65581;chr2/105472285/105472476/chr2:65591;chr2/111180
659/111180875/chr2:69784;chr2/112238344/112238562/chr2:70175;chr2/118982055/118982431/chr2:74873;c
hr2/119599436/119599993/chr2:75438;chr2/119599436/119599993/chr2:75438;chr2/119599436/119599993/ch
r2:75438;chr2/119602556/119602749/chr2:75443;chr2/127413759/127414118/chr2:82885;chr2/131674028/131
674174/chr2:86273;chr2/131721230/131721412/chr2:86315;chr2/131721230/131721412/chr2:86315;chr2/1317
92696/131792920/chr2:86384;chr2/131797547/131797851/chr2:86386;chr2/131797547/131797851/chr2:86386;
chr2/137522460/137522886/chr2:90583;chr2/137523350/137523663/chr2:90586;chr2/137523350/137523663/
chr2:90586;chr2/157185658/157185890/chr2:104090;chr2/162273294/162273350/chr2:106478;chr2/16228342
0/162284088/chr2:106503;chr2/162284279/162284774/chr2:106504;chr2/162284279/162284774/chr2:106504;
chr2/170625080/170625211/chr2:110300;chr2/171569569/171570071/chr2:110660;chr2/171572958/17157356
1/chr2:110663;chr2/171572958/171573561/chr2:110663;chr2/171572958/171573561/chr2:110663;chr2/172965
944/172966155/chr2:111138;chr2/172972755/172973021/chr2:111141;chr2/175191910/175192084/chr2:11200
6;chr2/175193753/175193890/chr2:112011;chr2/175195757/175196120/chr2:112016;chr2/175198572/1751990
64/chr2:112021;chr2/175198572/175199064/chr2:112021;chr2/175208701/175208893/chr2:112040;chr2/17693
1542/176931823/chr2:112960;chr2/176931542/176931823/chr2:112960;chr2/176946935/176947014/chr2:1129
81;chr2/176946935/176947014/chr2:112981;chr2/176956625/176956956/chr2:112993;chr2/176964833/176964
945/chr2:113005;chr2/176965226/176965318/chr2:113007;chr2/176973451/176973569/chr2:113020;chr2/1769
82334/176982522/chr2:113036;chr2/177016477/177016749/chr2:113072;chr2/177016477/177016749/chr2:113
072;chr2/177017049/177017266/chr2:113074;chr2/177024768/177024991/chr2:113083;chr2/177036408/17703
6551/chr2:113096;chr2/177036806/177037159/chr2:113097;chr2/177054348/177054557/chr2:113117;chr2/177
873532/177873742/chr2:113554;chr2/182546412/182546709/chr2:116545;chr2/200327235/200327462/chr2:12
4591;chr2/200327235/200327462/chr2:124591;chr2/200333691/200333800/chr2:124599;chr2/208989159/2089
89543/chr2:127877;chr2/219738085/219738741/chr2:132890;chr2/219857695/219857761/chr2:132992;chr2/22
0299712/220299794/chr2:133332;chr2/220313306/220313447/chr2:133352;chr2/220361577/220361845/chr2:1
33406;chr2/220493804/220494007/chr2:133483;chr2/233925072/233925317/chr2:141676;chr2/236579854/236
580385/chr2:143448;chr2/236962012/236962127/chr2:143566;chr2/237067694/237068149/chr2:143602;chr2/2
37068816/237069041/chr2:143605;chr2/237071845/237072124/chr2:143612;chr2/237072390/237072589/chr2:
143614;chr2/237081673/237081834/chr2:143623;chr2/238864628/238865041/chr2:145217;chr2/239072322/23
9072437/chr2:145320;chr2/240302575/240302644/chr2:146577;chr20/592495/592583/chr20:366;chr20/825633/
826365/chr20:567;chr20/825633/826365/chr20:567;chr20/3073947/3074286/chr20:2072;chr20/3073947/30742
86/chr20:2072;chr20/3204041/3204138/chr20:2128;chr20/17840247/17840428/chr20:11743;chr20/20433026/2
0433366/chr20:13300;chr20/21082149/21082215/chr20:13769;chr20/21687581/21687936/chr20:14217;chr20/2
1687581/21687936/chr20:14217;chr20/23066774/23067283/chr20:15385;chr20/23066774/23067283/chr20:153
85;chr20/23636683/23636783/chr20:15653;chr20/31116249/31116419/chr20:19124;chr20/32856719/32857305/
chr20:20375;chr20/34188455/34188891/chr20:20861;chr20/35490145/35491178/chr20:21574;chr20/36012595/
36012923/chr20:21782;chr20/39311379/39311636/chr20:24463;chr20/42744689/42744736/chr20:27929;chr20/
42744873/42744943/chr20:27930;chr20/43279673/43279869/chr20:28494;chr20/44686589/44686643/chr20:2
9750;chr20/44880014/44880139/chr20:30033;chr20/49307683/49308050/chr20:33326;chr20/49307683/493080
50/chr20:33326;chr20/52789941/52790002/chr20:35507;chr20/55200052/55200698/chr20:37915;chr20/552000
52/55200698/chr20:37915;chr20/55200052/55200698/chr20:37915;chr20/55202028/55202768/chr20:37919;chr
20/55202028/55202768/chr20:37919;chr20/55532842/55532860/chr20:38128;chr20/55965227/55965866/chr20:
38359;chr20/55965227/55965866/chr20:38359;chr20/56196092/56196287/chr20:38599;chr20/57224517/5722
5315/chr20:40041;chr20/57224517/57225315/chr20:40041;chr20/57224517/57225315/chr20:40041;chr20/5863
0953/58631215/chr20:41275;chr20/59828727/59828805/chr20:42845;chr20/61585426/61586109/chr20:45350;
chr20/61992028/61992488/chr20:46132;chr21/32546304/32546471/chr21:16832;chr21/38070378/38070671/ch
r21:21460;chr21/38076979/38077067/chr21:21468;chr21/38378456/38378600/chr21:21622;chr21/42218718/42
219076/chr21:24058;chr21/43145582/43146564/chr21:24587;chr21/44819059/44819973/chr21:26123;chr21/44
819059/44819973/chr21:26123;chr21/45246251/45246468/chr21:26382;chr21/45577321/45577994/chr21:2658
8;chr21/45577321/45577994/chr21:26588;chr21/45592714/45592967/chr21:26625;chr21/45592714/45592967/
chr21:26625;chr21/45627357/45627417/chr21:26687;chr21/45770297/45770337/chr21:26879;chr21/45770637/
45770704/chr21:26880;chr21/46126288/46126559/chr21:27407;chr21/46126288/46126559/chr21:27407;chr21/
46331605/46331714/chr21:27573;chr21/46334321/46334574/chr21:27580;chr21/47971598/47971831/chr21:30
067;chr22/19760482/19760564/chr22:2520;chr22/20780347/20780473/chr22:3197;chr22/23523932/23524438/
chr22:5588;chr22/23523932/23524438/chr22:5588;chr22/30661877/30662289/chr22:11999;chr22/30662646/30
663433/chr22:12000;chr22/33271212/33271346/chr22:13703;chr22/35748604/35748744/chr22:16424;chr22/35
876979/35877087/chr22:16512;chr22/37962038/37962114/chr22:18791;chr22/38572642/38572698/chr22:1919
5;chr22/40058029/40058457/chr22:20645;chr22/40058029/40058457/chr22:20645;chr22/42316277/42316352/
chr22:22245;chr22/42828172/42828446/chr22:22503;chr22/43524334/43524374/chr22:22910;chr22/45236689/
45236699/chr22:25804;chr22/46307842/46307986/chr22:26661;chr22/46362417/46362750/chr22:26698;chr22/
46367863/46368544/chr22:26710;chr22/46367863/46368544/chr22:26710;chr22/46367863/46368544/chr22:26
710;chr22/47070140/47070284/chr22:27244;chr22/47070407/47070938/chr22:27245;chr22/47170472/4717063
0/chr22:27297;chr22/50064671/50065042/chr22:32285;chr22/50201718/50201897/chr22:32524;chr22/5049719
0/50497359/chr22:32806;chr22/50623245/50623586/chr22:33035;chr22/50623245/50623586/chr22:33035;chr2
2/50986812/50986985/chr22:33343;chr22/50987102/50987681/chr22:33344;chr22/50987102/50987681/chr22:
33344;chr22/51042167/51042182/chr22:33382;chr22/51042483/51042635/chr22:33384;chr3/12910074/129105
05/chr3:11147;chr3/13456076/13456222/chr3:11629;chr3/32501521/32501675/chr3:21388;chr3/40657309/406
57378/chr3:25372;chr3/42947455/42947990/chr3:26304;chr3/48520598/48520813/chr3:29151;chr3/50313752/
50313821/chr3:29988;chr3/50378590/50378763/chr3:30022;chr3/52529185/52529620/chr3:31545;chr3/525291
85/52529620/chr3:31545;chr3/55517100/55517495/chr3:32653;chr3/56950279/56950401/chr3:33283;chr3/623
57136/62357293/chr3:35276;chr3/62358179/62358236/chr3:35278;chr3/63264002/63264099/chr3:36189;chr3/
65535076/65535366/chr3:37424;chr3/66848640/66848880/chr3:37910;chr3/67706043/67706567/chr3:38421;c
hr3/71275877/71276181/chr3:40964;chr3/87138182/87138575/chr3:53879;chr3/87138182/87138575/chr3:5387
9;chr3/109055832/109056025/chr3:66444;chr3/127795108/127796134/chr3:77376;chr3/127795108/127796134/
chr3:77376;chr3/127795108/127796134/chr3:77376;chr3/128274652/128274738/chr3:77592;chr3/129296978/
129297230/chr3:78142;chr3/129312876/129313022/chr3:78152;chr3/129693906/129694016/chr3:78292;chr3/1
33393092/133393676/chr3:80380;chr3/133393092/133393676/chr3:80380;chr3/133393092/133393676/chr3:80
380;chr3/138658264/138658703/chr3:82947;chr3/138658264/138658703/chr3:82947;chr3/138658812/1386591
05/chr3:82948;chr3/138658812/138659105/chr3:82948;chr3/147108531/147108856/chr3:88574;chr3/14711152
9/147111637/chr3:88580;chr3/147114049/147114194/chr3:88585;chr3/147127937/147127985/chr3:88606;chr3/
147128489/147128669/chr3:88609;chr3/147139245/147139324/chr3:88629;chr3/157812151/157812304/chr3:
93922;chr3/157821232/157821290/chr3:93935;chr3/171175712/171176140/chr3:101703;chr3/184319330/1843
19689/chr3:108851;chr3/184405514/184405563/chr3:108896;chr3/187676428/187676667/chr3:111184;chr3/19
2125798/192125964/chr3:113516;chr3/192127390/192127461/chr3:113520;chr3/194117547/194118422/chr3:1
14718;chr3/194117547/194118422/chr3:114718;chr3/194117547/194118422/chr3:114718;chr3/195583592/195
583698/chr3:115500;chr3/195886887/195887205/chr3:115743;chr3/196367454/196367940/chr3:116035;chr4/7
79344/779699/chr4:501;chr4/780353/780533/chr4:503;chr4/780353/780533/chr4:503;chr4/1049831/1049922/c
hr4:802;chr4/1210537/1211061/chr4:1058;chr4/1210537/1211061/chr4:1058;chr4/1398849/1399019/chr4:1184;
chr4/1773190/1773264/chr4:1786;chr4/1773616/1773799/chr4:1788;chr4/2292691/2292975/chr4:2184;chr4/48
59771/4860060/chr4:4199;chr4/4863382/4863400/chr4:4207;chr4/4869018/4869038/chr4:4217;chr4/5710267/5
710387/chr4:5397;chr4/6666045/6666167/chr4:6989;chr4/7195168/7195465/chr4:7409;chr4/8859124/8859261/
chr4:9784;chr4/8859124/8859261/chr4:9784;chr4/8864739/8864795/chr4:9796;chr4/8866180/8866258/chr4:97
99;chr4/8869267/8869307/chr4:9801;chr4/9783347/9783507/chr4:11142;chr4/10589431/10589606/chr4:11493;
chr4/13545251/13545542/chr4:14438;chr4/20256325/20256382/chr4:18872;chr4/21305940/21306025/chr4:198
92;chr4/24801473/24801623/chr4:22965;chr4/24801473/24801623/chr4:22965;chr4/24801727/24802065/chr4:
22966;chr4/24801727/24802065/chr4:22966;chr4/26275411/26275517/chr4:23558;chr4/41747656/41747785/c
hr4:36276;chr4/48493130/48493313/chr4:42704;chr4/48987795/48987835/chr4:42836;chr4/56659626/5665998
4/chr4:44965;chr4/85417611/85418301/chr4:61218;chr4/85418447/85418583/chr4:61219;chr4/85418687/8541
8746/chr4:61220;chr4/93226624/93226785/chr4:64606;chr4/102712009/102712321/chr4:69608;chr4/10271200
9/102712321/chr4:69608;chr4/111531751/111533022/chr4:73577;chr4/111531751/111533022/chr4:73577;chr4/
111531751/111533022/chr4:73577;chr4/111533322/111533386/chr4:73579;chr4/111536462/111536678/chr4:
73586;chr4/111536860/111537229/chr4:73587;chr4/111539436/111539906/chr4:73593;chr4/111540024/11154
0345/chr4:73594;chr4/111540024/111540345/chr4:73594;chr4/111540589/111540656/chr4:73596;chr4/111541
822/111541877/chr4:73600;chr4/111542062/111542380/chr4:73601;chr4/111554905/111554987/chr4:73618;c
hr4/111555101/111555502/chr4:73619;chr4/113432194/113432240/chr4:74602;chr4/113432450/113432550/ch
r4:74603;chr4/140656581/140657036/chr4:88873;chr4/144621470/144621591/chr4:90504;chr4/147560126/147
560227/chr4:91488;chr4/147560922/147561454/chr4:91490;chr4/147560922/147561454/chr4:91490;chr4/1547
10713/154710960/chr4:94568;chr4/155663868/155663983/chr4:95583;chr4/155664152/155664237/chr4:95584;
chr4/155666318/155666451/chr4:95586;chr4/169799143/169799621/chr4:103089;chr4/169799143/169799621/
chr4:103089;chr4/174422105/174422220/chr4:105773;chr4/174427714/174428328/chr4:105779;chr4/1744277
14/174428328/chr4:105779;chr4/174429805/174430859/chr4:105786;chr4/174429805/174430859/chr4:105786;
chr4/174437816/174437949/chr4:105796;chr4/174438994/174439178/chr4:105801;chr4/174445205/17444534
9/chr4:105812;chr4/174446409/174446459/chr4:105816;chr4/174452450/174452494/chr4:105826;chr4/183061
804/183062036/chr4:113059;chr4/183061804/183062036/chr4:113059;chr4/184828402/184828628/chr4:11385
4;chr4/186559232/186560504/chr4:114704;chr4/188918071/188918353/chr4:116452;chr4/188953026/1889532
83/chr4:116484;chr5/501955/502073/chr5:462;chr5/1851493/1851667/chr5:2487;chr5/1878105/1879524/chr5:2
522;chr5/1881584/1882309/chr5:2530;chr5/1881584/1882309/chr5:2530;chr5/1881584/1882309/chr5:2530;chr
5/2738572/2739312/chr5:3972;chr5/2740803/2741046/chr5:3973;chr5/2740803/2741046/chr5:3973;chr5/27408
03/2741046/chr5:3973;chr5/2743537/2743740/chr5:3982;chr5/2748314/2748924/chr5:3990;chr5/2748314/2748
924/chr5:3990;chr5/2749090/2749714/chr5:3991;chr5/2749090/2749714/chr5:3991;chr5/3591539/3591793/chr
5:5340;chr5/3596430/3596580/chr5:5353;chr5/3596430/3596580/chr5:5353;chr5/31194155/31194326/chr5:298
22;chr5/40680880/40681286/chr5:34395;chr5/40681858/40682027/chr5:34397;chr5/42951163/42951584/chr5:
35253;chr5/42952279/42952433/chr5:35255;chr5/42952279/42952433/chr5:35255;chr5/42952583/42952755/c
hr5:35256;chr5/50685285/50685600/chr5:38137;chr5/50685285/50685600/chr5:38137;chr5/54518882/5451943
2/chr5:40420;chr5/55117709/55117762/chr5:40593;chr5/60922160/60922380/chr5:42941;chr5/63801781/6380
1823/chr5:44959;chr5/63802221/63802341/chr5:44960;chr5/72526411/72527038/chr5:47662;chr5/72528040/7
2528709/chr5:47664;chr5/72594128/72594196/chr5:47695;chr5/72677124/72677354/chr5:47751;chr5/7267762
8/72677905/chr5:47752;chr5/72677628/72677905/chr5:47752;chr5/72678016/72678419/chr5:47753;chr5/7273
1821/72732044/chr5:47799;chr5/72732779/72732854/chr5:47802;chr5/76924024/76924300/chr5:49906;chr5/7
6933446/76933493/chr5:49916;chr5/77140756/77140889/chr5:50032;chr5/77253377/77253652/chr5:50094;chr
5/77253832/77254047/chr5:50095;chr5/77253832/77254047/chr5:50095;chr5/87955564/87955812/chr5:55500;
chr5/87968708/87968844/chr5:55512;chr5/92906093/92906850/chr5:59422;chr5/92906093/92906850/chr5:594
22;chr5/92908237/92908299/chr5:59425;chr5/92923512/92924029/chr5:59436;chr5/92923512/92924029/chr5:
59436;chr5/92923512/92924029/chr5:59436;chr5/92930529/92930781/chr5:59446;chr5/100239964/100240164/
chr5:63724;chr5/122433878/122433967/chr5:74156;chr5/122434104/122434128/chr5:74157;chr5/122434243/
122434303/chr5:74158;chr5/132147985/132148073/chr5:78096;chr5/132149854/132150238/chr5:78097;chr5/1
32149854/132150238/chr5:78097;chr5/132161113/132161911/chr5:78104;chr5/132161113/132161911/chr5:78
104;chr5/132161113/132161911/chr5:78104;chr5/132161113/132161911/chr5:78104;chr5/132161113/1321619
11/chr5:78104;chr5/133449110/133449541/chr5:78662;chr5/134363102/134364716/chr5:78998;chr5/13436310
2/134364716/chr5:78998;chr5/134363102/134364716/chr5:78998;chr5/134363102/134364716/chr5:78998;chr5/
134363102/134364716/chr5:78998;chr5/134363102/134364716/chr5:78998;chr5/134363102/134364716/chr5:
78998;chr5/134363102/134364716/chr5:78998;chr5/134364837/134365262/chr5:78999;chr5/134366914/13436
7436/chr5:79006;chr5/134376713/134376745/chr5:79018;chr5/134385819/134386368/chr5:79020;chr5/137795
098/137795305/chr5:81306;chr5/138850474/138850701/chr5:81647;chr5/139089542/139090010/chr5:81772;c
hr5/139144057/139144077/chr5:81802;chr5/139525719/139526053/chr5:82012;chr5/140306412/140306894/ch
r5:82369;chr5/140870906/140872485/chr5:82848;chr5/140870906/140872485/chr5:82848;chr5/140870906/140
872485/chr5:82848;chr5/140870906/140872485/chr5:82848;chr5/140870906/140872485/chr5:82848;chr5/1408
70906/140872485/chr5:82848;chr5/145717244/145717266/chr5:85426;chr5/145722488/145722602/chr5:85433;
chr5/148620215/148620253/chr5:87233;chr5/149546507/149546945/chr5:87652;chr5/149588968/149589167/
chr5:87673;chr5/150226201/150226446/chr5:87968;chr5/150226201/150226446/chr5:87968;chr5/153856015/1
53856075/chr5:90240;chr5/153858894/153858919/chr5:90246;chr5/153872975/153873090/chr5:90265;chr5/17
0737535/170738058/chr5:104900;chr5/170738774/170738886/chr5:104902;chr5/170741270/170741684/chr5:1
04910;chr5/170742528/170743369/chr5:104913;chr5/170743480/170744113/chr5:104914;chr5/171605252/171
605555/chr5:105373;chr5/172661014/172661117/chr5:106047;chr5/172663078/172663257/chr5:106053;chr5/1
74035906/174036064/chr5:107010;chr5/175560217/175560364/chr5:108580;chr5/176784998/176785181/chr5:
109677;chr5/176935213/176935464/chr5:109846;chr5/177434365/177434476/chr5:110299;chr5/177667820/17
7667909/chr5:110516;chr5/177988973/177989166/chr5:110736;chr5/178004175/178004617/chr5:110758;chr5/
178004175/178004617/chr5:110758;chr5/178420360/178420637/chr5:110987;chr5/180230432/180231193/chr
5:112498;chr6/392448/392484/chr6:258;chr6/1383826/1383865/chr6:1183;chr6/1601838/1601972/chr6:1422;c
hr6/1624759/1624977/chr6:1443;chr6/4079052/4079410/chr6:2565;chr6/6002471/6002605/chr6:3507;chr6/939
9170/9399321/chr6:5424;chr6/10113475/10113737/chr6:5604;chr6/10382027/10382451/chr6:5705;chr6/10382
027/10382451/chr6:5705;chr6/10398366/10398636/chr6:5743;chr6/10421512/10421572/chr6:5756;chr6/10425
307/10425542/chr6:5767;chr6/10720335/10720454/chr6:5918;chr6/10883079/10883209/chr6:5972;chr6/10883
702/10883894/chr6:5973;chr6/17016236/17016470/chr6:9094;chr6/20320017/20320581/chr6:11075;chr6/2725
1406/27251585/chr6:15015;chr6/27251740/27252023/chr6:15016;chr6/28741414/28741592/chr6:15820;chr6/2
8743522/28743843/chr6:15826;chr6/28743522/28743843/chr6:15826;chr6/28747803/28747995/chr6:15835;chr
6/29760089/29760181/chr6:17122;chr6/29894371/29894467/chr6:17315;chr6/30420999/30421116/chr6:17801;
chr6/32116930/32117018/chr6:19468;chr6/32813440/32813590/chr6:20282;chr6/35108801/35109129/chr6:220
71;chr6/35480055/35480141/chr6:22274;chr6/36737488/36737623/chr6:22829;chr6/41515716/41516104/chr6:
25691;chr6/41515716/41516104/chr6:25691;chr6/41515716/41516104/chr6:25691;chr6/41516270/41516539/c
hr6:25692;chr6/42335111/42335253/chr6:26100;chr6/44529077/44529148/chr6:27193;chr6/50787947/5078808
2/chr6:29961;chr6/50791110/50791617/chr6:29965;chr6/56716314/56716535/chr6:32402;chr6/84417571/8441
7763/chr6:49979;chr6/100903446/100903662/chr6:61889;chr6/100905984/100906245/chr6:61896;chr6/106429
435/106429672/chr6:64464;chr6/106434053/106434088/chr6:64468;chr6/107955163/107955625/chr6:65044;c
hr6/108437998/108438266/chr6:65256;chr6/108439985/108441283/chr6:65261;chr6/108439985/108441283/ch
r6:65261;chr6/108488593/108489118/chr6:65301;chr6/108488593/108489118/chr6:65301;chr6/108489236/108
489404/chr6:65302;chr6/108489620/108489668/chr6:65304;chr6/137809770/137810125/chr6:78388;chr6/1502
85936/150286136/chr6:83626;chr6/152002855/152003072/chr6:84423;chr6/163670578/163670807/chr6:93227;
chr6/163756788/163756921/chr6:93257;chr6/164051683/164051908/chr6:93382;chr6/166073897/166074010/
chr6:94398;chr6/168107103/168107373/chr6:97051;chr6/169572592/169572700/chr6:98184;chr6/170338436/1
70338749/chr6:98738;chr6/170338436/170338749/chr6:98738;chr6/170403023/170403277/chr6:98835;chr6/17
0580898/170581131/chr6:99039;chr7/150008/150194/chr7:188;chr7/331078/331128/chr7:465;chr7/641336/641
390/chr7:998;chr7/644124/644459/chr7:1002;chr7/644124/644459/chr7:1002;chr7/751335/752464/chr7:1111;c
hr7/1550454/1550554/chr7:2231;chr7/1552571/1552941/chr7:2235;chr7/1959733/1960285/chr7:2971;chr7/205
9280/2059501/chr7:3037;chr7/2059710/2060006/chr7:3038;chr7/2289078/2289150/chr7:3159;chr7/2548120/25
48211/chr7:3399;chr7/2550517/2550795/chr7:3404;chr7/3134486/3134688/chr7:4224;chr7/4304772/4305060/c
hr7:5076;chr7/4831750/4832626/chr7:5827;chr7/4848636/4849016/chr7:5865;chr7/12151500/12151663/chr7:1
1942;chr7/12610688/12610816/chr7:12112;chr7/19184554/19184738/chr7:16024;chr7/20824268/20824384/chr
7:17442;chr7/20824268/20824384/chr7:17442;chr7/23245947/23246055/chr7:18981;chr7/24323291/24323395/
chr7:19618;chr7/24325010/24325141/chr7:19622;chr7/25892451/25892715/chr7:20791;chr7/25898244/258992
81/chr7:20799;chr7/25898244/25899281/chr7:20799;chr7/25898244/25899281/chr7:20799;chr7/27199643/272
00193/chr7:21616;chr7/27204937/27204950/chr7:21623;chr7/27205783/27206164/chr7:21625;chr7/27205783/
27206164/chr7:21625;chr7/27214295/27214382/chr7:21636;chr7/27252771/27253381/chr7:21670;chr7/272602
29/27260528/chr7:21676;chr7/27260229/27260528/chr7:21676;chr7/27279058/27279119/chr7:21687;chr7/272
84639/27284889/chr7:21698;chr7/27284639/27284889/chr7:21698;chr7/27284639/27284889/chr7:21698;chr7/
27288961/27289408/chr7:21705;chr7/27290903/27291485/chr7:21709;chr7/27290903/27291485/chr7:21709;c
hr7/29606046/29606319/chr7:22817;chr7/35294861/35295431/chr7:26623;chr7/35296875/35297026/chr7:2662
7;chr7/35297250/35297364/chr7:26628;chr7/35297698/35298216/chr7:26630;chr7/35298542/35298706/chr7:2
6632;chr7/35494396/35494506/chr7:26792;chr7/37392844/37393221/chr7:28387;chr7/45690753/45690819/chr
7:33273;chr7/47608222/47608452/chr7:34502;chr7/56297481/56297660/chr7:43272;chr7/64349675/64350015/
chr7:47203;chr7/65878615/65878773/chr7:48104;chr7/71800646/71800933/chr7:55088;chr7/71801344/718015
41/chr7:55090;chr7/71801344/71801541/chr7:55090;chr7/71801799/71802093/chr7:55092;chr7/71801799/718
02093/chr7:55092;chr7/73121630/73121821/chr7:56155;chr7/73183158/73184204/chr7:56212;chr7/73508288/
73508573/chr7:56510;chr7/73508677/73509186/chr7:56511;chr7/86274132/86274274/chr7:65151;chr7/862741
32/86274274/chr7:65151;chr7/94023566/94023795/chr7:70740;chr7/96650061/96650101/chr7:71790;chr7/966
50428/96650566/chr7:71792;chr7/100028259/100028424/chr7:74817;chr7/100844956/100845521/chr7:75501;
chr7/100844956/100845521/chr7:75501;chr7/116964411/116964725/chr7:83336;chr7/121946918/121947079/c
hr7:86344;chr7/121957163/121957214/chr7:86360;chr7/127671158/127671217/chr7:89761;chr7/127671158/12
7671217/chr7:89761;chr7/127671581/127672237/chr7:89763;chr7/127671581/127672237/chr7:89763;chr7/127
671581/127672237/chr7:89763;chr7/127672383/127672851/chr7:89764;chr7/127672383/127672851/chr7:8976
4;chr7/128555660/128555728/chr7:90426;chr7/129781009/129781205/chr7:90966;chr7/132261368/132261547/
chr7:92851;chr7/142495145/142495246/chr7:98662;chr7/149119904/149120359/chr7:104170;chr7/149119904/
149120359/chr7:104170;chr7/149745077/149745159/chr7:104739;chr7/153445194/153445394/chr7:108035;c
hr7/153583530/153583710/chr7:108224;chr7/153748796/153748893/chr7:108489;chr7/153749894/153750278/
chr7:108492;chr7/154002021/154002196/chr7:108884;chr7/154705814/154705867/chr7:109868;chr7/1551670
37/155167117/chr7:110332;chr7/155250298/155250363/chr7:110491;chr7/155258829/155258985/chr7:110504;
chr7/155556480/155556793/chr7:110841;chr7/155595704/155595803/chr7:110879;chr7/155598690/15559974
6/chr7:110882;chr7/155598690/155599746/chr7:110882;chr7/156796810/156796867/chr7:112365;chr7/156813
643/156813832/chr7:112396;chr7/157485363/157485649/chr7:113322;chr7/157486426/157486717/chr7:11332
6;chr7/157486426/157486717/chr7:113326;chr7/158110722/158110752/chr7:114517;chr7/158362621/1583627
44/chr7:114937;chr7/158362621/158362744/chr7:114937;chr7/158505175/158505367/chr7:114992;chr8/19504
76/1950657/chr8:3057;chr8/8559885/8559991/chr8:12234;chr8/8654846/8654935/chr8:12313;chr8/10586613/1
0587079/chr8:14495;chr8/10588583/10589358/chr8:14496;chr8/10588583/10589358/chr8:14496;chr8/1750911
1/17509337/chr8:22638;chr8/19797537/19797821/chr8:23816;chr8/20092455/20092607/chr8:24179;chr8/2190
5524/21905755/chr8:26910;chr8/21905524/21905755/chr8:26910;chr8/25898101/25898219/chr8:30839;chr8/2
5900639/25900766/chr8:30847;chr8/25907047/25907075/chr8:30858;chr8/27221306/27221473/chr8:32212;chr
8/37557235/37557369/chr8:43546;chr8/38412086/38412230/chr8:44019;chr8/41424341/41425161/chr8:46141;
chr8/41424341/41425161/chr8:46141;chr8/41624189/41624427/chr8:46264;chr8/54789694/54789895/chr8:556
76;chr8/54791824/54791953/chr8:55682;chr8/65282149/65282304/chr8:65459;chr8/65282149/65282304/chr8:
65459;chr8/65282839/65282980/chr8:65462;chr8/65286067/65286267/chr8:65468;chr8/65286067/65286267/c
hr8:65468;chr8/70982068/70982262/chr8:70720;chr8/80804060/80804359/chr8:80237;chr8/80804060/8080435
9/chr8:80237;chr8/96193567/96193686/chr8:92031;chr8/97156629/97157376/chr8:92621;chr8/97156629/9715
7376/chr8:92621;chr8/97170306/97170403/chr8:92641;chr8/99954431/99954678/chr8:94384;chr8/99959773/9
9959954/chr8:94393;chr8/99960243/99962202/chr8:94395;chr8/99960243/99962202/chr8:94395;chr8/9996024
3/99962202/chr8:94395;chr8/99960243/99962202/chr8:94395;chr8/99985631/99986981/chr8:94413;chr8/9998
5631/99986981/chr8:94413;chr8/99985631/99986981/chr8:94413;chr8/99985631/99986981/chr8:94413;chr8/1
01118020/101118645/chr8:94672;chr8/101118020/101118645/chr8:94672;chr8/102236112/102236533/chr8:95
187;chr8/103750882/103751038/chr8:95871;chr8/105478815/105478973/chr8:97368;chr8/116679656/1166798
60/chr8:109001;chr8/142045998/142046591/chr8:131588;chr8/142099939/142100219/chr8:131632;chr8/14210
5772/142105871/chr8:131639;chr8/142160199/142160378/chr8:131679;chr8/142216446/142216722/chr8:1317
19;chr8/142216835/142216922/chr8:131720;chr8/142276263/142276522/chr8:131773;chr8/142276263/142276
522/chr8:131773;chr8/143545856/143546249/chr8:134688;chr8/143545856/143546249/chr8:134688;chr8/1435
45856/143546249/chr8:134688;chr8/143545856/143546249/chr8:134688;chr8/144105813/144105864/chr8:135
782;chr8/144598804/144599034/chr8:136515;chr8/144965156/144965351/chr8:136809;chr8/145106040/14510
6315/chr8:136951;chr8/145106953/145107056/chr8:136954;chr8/145725668/145725940/chr8:137231;chr8/145
900685/145901387/chr8:137341;chr8/145900685/145901387/chr8:137341;chr9/971339/971502/chr9:559;chr9/
971339/971502/chr9:559;chr9/1046136/1046387/chr9:629;chr9/1046136/1046387/chr9:629;chr9/14345455/143
46298/chr9:9646;chr9/17906443/17906570/chr9:11721;chr9/17907412/17907457/chr9:11723;chr9/21970692/2
1971184/chr9:14497;chr9/22006179/22006227/chr9:14533;chr9/23820722/23820875/chr9:16719;chr9/3564967
2/35649818/chr9:27462;chr9/36458376/36458935/chr9:27909;chr9/40332435/40332647/chr9:30081;chr9/7097
1904/70972207/chr9:33824;chr9/89517790/89517820/chr9:45940;chr9/90692017/90692063/chr9:46536;chr9/9
2098876/92099282/chr9:47340;chr9/93601605/93601852/chr9:48090;chr9/93605351/93605452/chr9:48093;chr
9/93925345/93925540/chr9:48226;chr9/95821836/95821957/chr9:49201;chr9/96030882/96031112/chr9:49324;
chr9/96108466/96109062/chr9:49358;chr9/98315341/98315575/chr9:50909;chr9/99482110/99482542/chr9:517
30;chr9/110249659/110249822/chr9:60417;chr9/124981875/124982017/chr9:71533;chr9/126135749/12613603
4/chr9:72291;chr9/126182928/126183193/chr9:72320;chr9/126775129/126775228/chr9:72476;chr9/126776099/
126776220/chr9:72480;chr9/126776099/126776220/chr9:72480;chr9/126777283/126777853/chr9:72484;chr9/
126778239/126778747/chr9:72485;chr9/126779162/126779369/chr9:72487;chr9/128651477/128651756/chr9:7
3447;chr9/129377596/129377653/chr9:74268;chr9/129386285/129386431/chr9:74290;chr9/130545182/130545
693/chr9:75047;chr9/131465499/131465770/chr9:75689;chr9/132099165/132099614/chr9:76050;chr9/1320991
65/132099614/chr9:76050;chr9/132650647/132651025/chr9:76569;chr9/132650647/132651025/chr9:76569;chr
9/134128101/134128615/chr9:77644;chr9/134148417/134149187/chr9:77669;chr9/134150975/134151518/chr9:
77677;chr9/134429947/134430489/chr9:77880;chr9/134429947/134430489/chr9:77880;chr9/134429947/1344
30489/chr9:77880;chr9/134465858/134466099/chr9:77900;chr9/136150213/136150486/chr9:79817;chr9/13671
0220/136710361/chr9:80713;chr9/137185428/137185962/chr9:81257;chr9/137288189/137288710/chr9:81367;
chr9/138136050/138136084/chr9:83477;chr9/138999163/138999618/chr9:85122;chr9/139002578/139002859/c
hr9:85129;chr9/139002578/139002859/chr9:85129;chr9/139428429/139428610/chr9:85664;chr9/139514100/13
9514472/chr9:85767;chr9/139522722/139522800/chr9:85784;chr9/139715663/139716114/chr9:86060;chr9/139
880320/139880622/chr9:86173;chr9/139880320/139880622/chr9:86173;chr9/139892507/139892724/chr9:8619
4;chrX/9733543/9734032/chrX:7325;chrX/9733543/9734032/chrX:7325;chrX/11445215/11445879/chrX:8252;ch
rX/17673590/17674072/chrX:13316;chrX/17674183/17674448/chrX:13317;chrX/17674183/17674448/chrX:1331
7;chrX/25029910/25030303/chrX:18683;chrX/39865028/39865263/chrX:32853;chrX/39865028/39865263/chrX:
32853;chrX/39865028/39865263/chrX:32853;chrX/39868827/39868988/chrX:32862;chrX/39943287/39943396/
chrX:32911;chrX/39949200/39949896/chrX:32923;chrX/39949200/39949896/chrX:32923;chrX/40027402/40027
583/chrX:32995;chrX/40027402/40027583/chrX:32995;chrX/51486750/51486844/chrX:41006;chrX/82763606/8
2763847/chrX:63554;chrX/102862629/102863551/chrX:78770;chrX/139846861/139847316/chrX:106698;chrX/1
44903082/144903254/chrX:112617

TABLE 3
1/chr2:2233:chr2:74875400-74875253:2;2/chr17:3789:chr17:76127734-76127596:2;3/chr17:3789:chr17:761277
34-76127596:1;4/chr13:1108:chr13:102569075-102568913:2;5/chr15:1558:chr15:76639811-76639638:2;6/chr3:
2471:chr3:129693768-129693603:2;7/chr3:2471:chr3:129693768-129693603:1;8/chr20:476:chr20:20346167-20
345995:2;9/chr20:476:chr20:20346167-20345995:1;10/chrX:666:chrX:39865012-39864870:2;11/chrX:666:chrX:
39865012-39864870:1;12/chr6:107:chr6:1394171-1393998:2;13/chr6:107:chr6:1394171-1393998:1;14/chr10:36
52:chr10:126841036-126840898:2;15/chr5:511:chr5:1886280-1886110:2;16/chr5:511:chr5:1886280-1886110:1;
17/chr10:2358:chr10:90343146-90342980:2;18/chr10:2358:chr10:90343146-90342980:1;19/chr7:1085:chr7:492
3213-4923087:2;20/chr7:1085:chr7:4923213-4923087:1;21/chr22:369:chr22:22863239-22863073:2;22/chr22:36
9:chr22:22863239-22863073:1;23/chr2:4945:chr2:231693435-231693284:2;24/chr1:6929:chr1:228604223-2286
04052:2;25/chr1:6929:chr1:228604223-228604052:1;26/chr1:135:chr1:1118365-1118237:2;27/chr2:4945:chr2:2
31693435-231693284:1;28/chr6:1534:chr6:41516262-41516105:2;29/chr6:1534:chr6:41516262-41516105:1;30/
chr5:1172:chr5:15500318-15500170:2;31/chr5:1172:chr5:15500318-15500170:1;32/chr21:100:chr21:27945341-
27945166:2;33/chr21:100:chr21:27945341-27945166:1;34/chr17:4139:chr17:77789328-77789178:2;35/chr17:4
139:chr17:77789328-77789178:1;36/chr2:3049:chr2:112939620-112939458:2;37/chr2:3049:chr2:112939620-11
2939458:1;38/chr2:3000:chr2:110372627-110372460:2;39/chr2:3000:chr2:110372627-110372460:1;40/chr15:2
02:chr15:27018021-27017886:2;41/chr21:214:chr21:34442616-34442458:2;42/chr22:2208:chr22:48972303-489
72136:2;43/chr1:255:chr1:1567854-1567688:2;44/chr1:255:chr1:1567854-1567688:1;45/chr5:2253:chr5:132159
079-132158908:2;46/chr5:2253:chr5:132159079-132158908:1;47/chr4:2621:chr4:158141798-158141647:2;48/c
hr4:2621:chr4:158141798-158141647:1;49/chr15:2502:chr15:101514172-101513998:2;50/chr15:2502:chr15:10
1514172-101513998:1;51/chr16:3215:chr16:77468577-77468407:2;52/chr10:524:chr10:8097895-8097770:2;53/
chr10:524:chr10:8097895-8097770:1;54/chr14:2140:chr14:103011201-103011069:2;55/chr14:2140:chr14:1030
11201-103011069:1;56/chr16:2161:chr16:49316592-49316446:2;57/chr16:2161:chr16:49316592-49316446:1;5
8/chr16:660:chr16:2229286-2229134:2;59/chr16:660:chr16:2229286-2229134:1;60/chr21:158:chr21:32931455-
32931302:2;61/chr21:158:chr21:32931455-32931302:1;62/chr1:1408:chr1:4715062-4714912:2;63/chr1:1408:ch
r1:4715062-4714912:1;64/chr7:2651:chr7:71801536-71801361:2;65/chr18:585:chr18:32847656-32847529:2;66/
chr18:585:chr18:32847656-32847529:1;67/chrX:693:chrX:40005296-40005124:2;68/chr6:384:chr6:10385378-1
0385211:2;69/chr6:384:chr6:10385378-10385211:1;70/chr10:4059:chr10:131763456-131763291:1;71/chr10:23
15:chr10:88127376-88127203:2;72/chr10:4752:chr10:134862727-134862555:2;73/chr10:4752:chr10:13486272
7-134862555:1;74/chr4:1664:chr4:40859206-40859060:2;75/chr20:2210:chr20:59827285-59827128:2;76/chr20:
2210:chr20:59827285-59827128:1;77/chr1:2257:chr1:13840264-13840092:2;78/cg14015706:chr9:132382533-1
32382363:2;79/chr1:3856:chr1:44883461-44883295:2;80/chr1:3856:chr1:44883461-44883295:1;81/chr5:1926:c
hr5:92906491-92906331:2;82/chr5:1926:chr5:92906491-92906331:1;83/chr4:1277:chr4:8873618-8873451:2;84/
chr4:1277:chr4:8873618-8873451:1;85/chr2:1903:chr2:63275748-63275577:2;86/chr2:1903:chr2:63275748-63
275577:1;87/chr13:498:chr13:36045378-36045214:2;88/chr13:498:chr13:36045378-36045214:1;89/chr20:16:ch
r20:590990-590826:2;90/chr20:16:chr20:590990-590826:1;91/chr9:631:chr9:79637979-79637807:2;92/chr9:63
1:chr9:79637979-79637807:1;93/chr12:1125:chr12:52215440-52215276:2;94/chr12:1125:chr12:52215440-5221
5276:1;95/chr5:3695:chr5:178421865-178421739:2;96/chr5:3695:chr5:178421865-178421739:1;97/chr2:5245:c
hr2:237082355-237082229:2;98/chr2:5245:chr2:237082355-237082229:1;99/chr2:2749:chr2:105459384-10545
9226:2;100/chr19:3278:chr19:38886459-38886315:2;101/chr19:3278:chr19:38886459-38886315:1;102/chr5:18
61:chr5:79865947-79865773:2;103/chr5:1861:chr5:79865947-79865773:1;104/chr12:1613:chr12:72666288-726
66160:2;105/chr20:55:chr20:826311-826169:1;106/chr7:4565:chr7:155744739-155744570:2;107/chr7:4565:chr
7:155744739-155744570:1;108/chr11:2492:chr11:65314238-65314112:2;109/chr11:2492:chr11:65314238-6531
4112:1;110/chr22:1852:chr22:46476380-46476222:2;111/chr19:3278:chr19:38886953-38886810:2;112/chr19:3
278:chr19:38886953-38886810:1;113/chr1:3004:chr1:25256952-25256777:2;114/chr1:3004:chr1:25256952-252
56777:1;115/chr2:3107:chr2:115919136-115918980:2;116/chr2:3107:chr2:115919136-115918980:1;117/chr14:
1768:chr14:99712874-99712699:2;118/chr14:1768:chr14:99712874-99712699:1;119/chr1:4393:chr1:65731677-
65731502:2;120/chr1:4393:chr1:65731677-65731502:1;121/chr6:1002:chr6:31466039-31465910:2;122/chr6:10
02:chr6:31466039-31465910:1;123/chr4:1602:chr4:37245666-37245506:2;124/chr4:1602:chr4:37245666-37245
506:1;125/cg20150591:chr7:3341836-3341666:1;126/chr1:3001:chr1:25255666-25255516:2;127/chr1:3001:chr
1:25255666-25255516:1;128/chr3:2471:chr3:129693987-129693820:2;129/chr3:2471:chr3:129693987-1296938
20:1;130/chrX:810:chrX:48685760-48685622:2;131/chrX:810:chrX:48685760-48685622:1;132/chr10:4581:chr1
0:134598205-134598030:2;133/chr10:4581:chr10:134598205-134598030:1;134/chr12:1613:chr12:72666288-72
666160:1;135/chr4:1726:chr4:44449915-44449740:2;136/chr4:1726:chr4:44449915-44449740:1;137/chr12:146
3:chr12:58132085-58131910:2;138/chr12:1463:chr12:58132085-58131910:1;139/chr1:250:chr1:1564969-15647
94:2;140/chr1:250:chr1:1564969-1564794:1;141/chr22:1852:chr22:46476380-46476222:1;142/chr10:1053:chr1
0:30026167-30026042:2;143/chr10:1053:chr10:30026167-30026042:1;144/chr22:1851:chr22:46474973-464748
01:2;145/chr22:1851:chr22:46474973-46474801:1;146/chr1:1191:chr1:3460237-3460068:2;147/chr1:1191:chr1:
3460237-3460068:1;148/chr22:2792:chr22:51136423-51136250:1;149/chr22:1851:chr22:46474900-46474773:2;
150/chr22:1851:chr22:46474900-46474773:1;151/chr1:7109:chr1:234040655-234040480:2;152/chr1:7109:chr1:
234040655-234040480:1;153/chr4:1664:chr4:40859206-40859060:1;154/chr14:2764:chr14:105953705-105953
539:2;155/chr14:2764:chr14:105953705-105953539:1;156/chr1:2257:chr1:13840264-13840092:1;157/cg14015
706:chr9:132382533-132382363:1;158/chr1:253:chr1:1566007-1565832:2;159/chr8:1701:chr8:54163712-54163
569:2;160/chr8:1701:chr8:54163712-54163569:1;161/chr1:253:chr1:1566007-1565832:1;162/chr6:2499:chr6:13
3562528-133562367:2;163/chr6:2499:chr6:133562528-133562367:1;164/chr13:289:chr13:26626335-26626201:
2;165/chr13:289:chr13:26626335-26626201:1;166/chr18:106:chr18:5891051-5890907:2;167/chr18:106:chr18:5
891051-5890907:1;168/chr15:1830:chr15:83952319-83952147:2;169/chr15:1830:chr15:83952319-83952147:1;
170/chr19:4915:chr19:58609688-58609514:2;171/chr19:4915:chr19:58609688-58609514:1;172/chr18:106:chr1
8:5891311-5891142:2;173/chr18:106:chr18:5891311-5891142:1;174/chr2:2749:chr2:105459384-105459226:1;1
75/chr2:1992:chr2:66673393-66673219:2;176/chr2:1992:chr2:66673393-66673219:1;177/chr7:4817:chr7:15747
8260-157478134:2;178/chr7:4817:chr7:157478260-157478134:1;179/chr2:4288:chr2:177053792-177053619:2;
180/chr2:4288:chr2:177053792-177053619:1;181/chr12:1757:chr12:95942574-95942447:2;182/chr12:1757:chr
12:95942574-95942447:1;183/chr13:100:chr13:21296290-21296119:2;184/chr13:100:chr13:21296290-2129611
9:1;185/chr1:3957:chr1:47905180-47905039:2;186/chr1:3957:chr1:47905180-47905039:1;187/chr15:202:chr15:
27018080-27017922:2;188/chr15:202:chr15:27018080-27017922:1;189/chr7:3563:chr7:128809175-128809031:
2;190/chr7:3563:chr7:128809175-128809031:1;191/chr21:948:chr21:45875503-45875340:2;192/chr21:948:chr2
1:45875503-45875340:1;193/chr2:2233:chr2:74875400-74875253:1;194/chr3:1010:chr3:45187734-45187580:2;
195/chr3:1010:chr3:45187734-45187580:1;196/chr10:2022:chr10:77156070-77155895:2;197/chr10:2022:chr10:
77156070-77155895:1;198/chr5:3649:chr5:178017127-178016990:2;199/chr5:3649:chr5:178017127-17801699
0:1;200/chr12:464:chr12:7592967-7592800:2;201/chr12:464:chr12:7592967-7592800:1;202/chr10:784:chr10:16
562465-16562317:2;203/chr10:784:chr10:16562465-16562317:1;204/chr13:1108:chr13:102569075-102568913:
1;205/chr7:3079:chr7:98971820-98971650:2;206/chr15:1558:chr15:76639811-76639638:1;207/chr3:431:chr3:1
3591027-13590877:2;208/chr3:431:chr3:13591027-13590877:1;209/chr13:1184:chr13:109793440-109793267:2;
210/chr13:1184:chr13:109793440-109793267:1;211/chr7:3079:chr7:98971820-98971650:1;212/chrX:1761:chr
X:151142962-151142793:2;213/chrX:1761:chrX:151142962-151142793:1;214/chr6:852:chr6:28945366-289451
95:2;215/chr6:852:chr6:28945366-28945195:1;216/chr10:3652:chr10:126841036-126840898:1;217/chr11:105:c
hr11:640156-639983:2;218/chr11:105:chr11:640156-639983:1;219/chr6:890:chr6:29521568-29521403:2;220/ch
r6:890:chr6:29521568-29521403:1;221/chr18:994:chr18:55095196-55095066:2;222/chr18:994:chr18:55095196-
55095066:1;223/chr10:1053:chr10:30025825-30025652:2;224/chr10:1053:chr10:30025825-30025652:1;225/ch
r12:1757:chr12:95942874-95942730:2;226/chr12:1757:chr12:95942874-95942730:1;227/chr2:4233:chr2:17697
2445-176972287:2;228/chr2:4233:chr2:176972445-176972287:1;229/chr1:135:chr1:1118365-1118237:1;230/ch
r7:3586:chr7:129422136-129421964:2;231/chr7:3586:chr7:129422136-129421964:1;232/chr8:1893:chr8:65493
890-65493722:2;233/chr8:1893:chr8:65493890-65493722:1;234/chr20:555:chr20:21503414-21503264:2;235/ch
r20:555:chr20:21503414-21503264:1;236/chr22:2727:chr22:50738247-50738077:2;237/chr22:2727:chr22:5073
8247-50738077:1;238/chr22:2146:chr22:48885161-48884988:2;239/chr22:2146:chr22:48885161-48884988:1;2
40/chr17:2060:chr17:40822203-40822036:2;241/chr17:2060:chr17:40822203-40822036:1;242/chr7:4817:chr7:1
57478079-157477908:2;243/chr7:4817:chr7:157478079-157477908:1;244/chr22:294:chr22:20779881-2077971
0:2;245/chr22:294:chr22:20779881-20779710:1;246/chr10:2949:chr10:108924827-108924697:2;247/chr10:294
9:chr10:108924827-108924697:1;248/chr13:657:chr13:49795267-49795096:2;249/chr13:657:chr13:49795267-4
9795096:1;250/chr18:280:chr18:11752099-11751930:2;251/chr18:280:chr18:11752099-11751930:1;252/chr18:
1155:chr18:70534901-70534728:2;253/chr18:1155:chr18:70534901-70534728:1;254/chr6:458:chr6:12750199-1
2750024:2;255/chr5:1190:chr5:16179981-16179816:2;256/chr5:1190:chr5:16179981-16179816:1;257/chr6:458:
chr6:12750199-12750024:1;258/chr4:122:chr4:996466-996316:2;259/chr4:122:chr4:996466-996316:1;260/chr1
5:202:chr15:27018021-27017886:1;261/chr3:2134:chr3:123167367-123167219:2;262/chr3:2134:chr3:12316736
7-123167219:1;263/chr21:214:chr21:34442616-34442458:1;264/chr2:2631:chr2:99439224-99439049:2;265/chr
2:2631:chr2:99439224-99439049:1;266/chr18:92:chr18:5543725-5543553:2;267/chr18:92:chr18:5543725-5543
553:1;268/chr22:2208:chr22:48972303-48972136:1;269/chr8:2963:chr8:142428420-142428248:2;270/chr16:32
15:chr16:77468577-77468407:1;271/chr14:363:chr14:37136055-37135925:2;272/chr14:363:chr14:37136055-37
135925:1;273/chr4:759:chr4:5710116-5709949:2;274/chr4:759:chr4:5710116-5709949:1;275/chr14:343:chr14:3
7116474-37116302:2;276/chr14:343:chr14:37116474-37116302:1;277/chr2:1220:chr2:25438940-25438782:2;2
78/chr2:1220:chr2:25438940-25438782:1;279/chr6:138:chr6:1614837-1614673:2;280/chr6:138:chr6:1614837-1
614673:1;281/chr13:1053:chr13:100548262-100548120:2;282/chr13:1053:chr13:100548262-100548120:1;283/
chr10:4357:chr10:133796158-133795994:2;284/chr10:4357:chr10:133796158-133795994:1;285/chr8:2963:chr8:
142428420-142428248:1;286/chr10:2874:chr10:105344506-105344334:2;287/chr10:2874:chr10:105344506-10
5344334:1;288/chr4:470:chr4:2820416-2820245:2;289/chr4:470:chr4:2820416-2820245:1;290/chr1:224:chr1:14
75999-1475831:2;291/chr1:224:chr1:1475999-1475831:1;292/chr7:2651:chr7:71801536-71801361:1;293/chr2:1
346:chr2:27530576-27530436:2;294/chr2:1346:chr2:27530576-27530436:1;295/chrX:693:chrX:40005296-4000
5124:1;296/chr2:5206:chr2:236579734-236579578:2;297/chr2:5206:chr2:236579734-236579578:1;298/chr9:43
1:chr9:37002679-37002504:2;299/chr9:431:chr9:37002679-37002504:1;300/chr5:3644:chr5:178004124-178003
949:2;301/chr5:3644:chr5:178004124-178003949:1;302/chr10:2315:chr10:88127376-88127203:1;303/chr1:454
7:chr1:85513897-85513764:2;304/chr1:4547:chr1:85513897-85513764:1;305/chr7:1543:chr7:27213065-272129
00:2;306/chr7:1543:chr7:27213065-27212900:1;307/chrX:678:chrX:39949826-39949682:2;308/chrX:678:chrX:3
9949826-39949682:1;309/chr10:2761:chr10:102987102-102986950:2;310/chr10:2761:chr10:102987102-10298
6950:1;311/chr21:333:chr21:38081761-38081621:2;312/chr21:333:chr21:38081761-38081621:1;313/chr3:3332:
chr3:192233099-192232925:2;314/chr11:550:chr11:1995413-1995241:1;315/chr3:3332:chr3:192233099-19223
2925:1;316/chr14:2167:chr14:103396473-103396302:2;317/chr14:2167:chr14:103396473-103396302:1;318/chr
3:9:chr3:240109-239939:2;319/chr3:9:chr3:240109-239939:1;320/chr19:3833:chr19:46443576-46443407:2;321/
chr14:2758:chr14:105944625-105944473:2;322/chr14:2758:chr14:105944625-105944473:1;323/chr19:3833:chr
19:46443576-46443407:1;324/chr11:4166:chr11:119211505-119211357:2;325/chr11:4166:chr11:119211505-11
9211357:1;326/cg09639725:chr10:134901305-134901161:1;327/cg15825786:chr10:134901305-134901161:1;3
28/chr22:1894:chr22:46658866-46658705:2;329/chr22:1894:chr22:46658866-46658705:1;330/chr9:3185:chr9:1
38675144-138674988:2;331/chr9:3185:chr9:138675144-138674988:1;332/chr5:3298:chr5:174159305-1741591
30:2;333/chr5:3298:chr5:174159305-174159130:1;334/chr17:1937:chr17:38473317-38473192:1;335/chr9:1956:
Chr9:130516703-130516534:2;336/chr9:1956:chr9:130516703-130516534:1;337/chr11:1212:chr11:13031307-1
3031134:2;338/chr11:1212:chr11:13031307-13031134:1;339/chr17:270:chr17:1959038-1958866:2;340/chr17:2
70:chr17:1959038-1958866:1;341/chr5:3113:chr5:170289623-170289457:2;342/chr5:3113:chr5:170289623-170
289457:1;343/chr18:989:chr18:55019939-55019814:2;344/chr18:989:chr18:55019939-55019814:1;345/chr4:17
27:chr4:44450787-44450634:2;346/chr4:1727:chr4:44450787-44450634:1;347/chr3:2770:chr3:147128423-1471
28260:2;348/chr3:2770:chr3:147128423-147128260:1;349/chr9:1073:chr9:96715765-96715640:2;350/chr5:703:
chr5:2750656-2750482:2;351/chr5:703:chr5:2750656-2750482:1;352/chr4:2332:chr4:122302024-122301861:2;
353/chr9:2117:chr9:132382389-132382264:2;354/chr9:2117:chr9:132382389-132382264:1;355/chr2:605:chr2:5
837209-5837047:2;356/chr13:1196:chr13:110437232-110437061:2;357/chr13:1196:chr13:110437232-1104370
61:1;358/chr1:4393:chr1:65731623-65731457:2;359/chr1:4393:chr1:65731623-65731457:1;360/chr2:605:chr2:5
837209-5837047:1;361/chr19:1722:chr19:13617165-13616996:2;362/chr19:1722:chr19:13617165-13616996:1;
363/chr5:1725:chr5:72732819-72732644:2;364/chr5:1725:chr5:72732819-72732644:1;365/chr15:1477:chr15:75
248526-75248387:2;366/chr15:1477:chr15:75248526-75248387:1;367/chr13:518:chr13:37005646-37005519:2;
368/chr13:518:chr13:37005646-37005519:1;369/chr21:324:chr21:38077231-38077087:2;370/chr21:324:chr21:3
8077231-38077087:1;371/chr7:4817:chr7:157478460-157478320:2;372/chr7:4817:chr7:157478460-157478320:
1;373/chr1:1852:chr1:8277355-8277184:2;374/chr1:1852:chr1:8277355-8277184:1;375/chr8:3705:chr8:145107
103-145106943:2;376/chr8:3705:chr8:145107103-145106943:1;377/chr9:1073:chr9:96715765-96715640:1;378/
chr4:2332:chr4:122302024-122301861:1;379/chr13:1076:chr13:100641750-100641625:2;380/chr13:1076:chr13:
100641750-100641625:1;381/chr5:1664:chr5:66462501-66462352:1;382/chr10:1246:chr10:43600476-4360032
9:2;383/chr10:1246:chr10:43600476-43600329:1;384/chr1:5286:chr1:154475241-154475091:2;385/chr1:5286:c
hr1:154475241-154475091:1;386/chr6:2249:chr6:108439079-108438904:1;387/chr22:2148:chr22:48885967-48
885792:2;388/chr22:2148:chr22:48885967-48885792:1;389/chr12:1542:chr12:66123228-66123066:2;390/chr12:
1542:chr12:66123228-66123066:1;391/chr12:428:chr12:6665239-6665090:2;392/chr12:428:chr12:6665239-66
65090:1;393/chr15:1832:chr15:83953929-83953794:2;394/chr15:1832:chr15:83953929-83953794:1;395/chr11:
2301:chr11:63768349-63768184:2;396/chr11:2301:chr11:63768349-63768184:1;397/chr16:2445:chr16:543243
19-54324153:2;398/chr16:2445:chr16:54324319-54324153:1;399/chr17:2514:chr17:48195117-48194949:2;400/
chr17:2514:chr17:48195117-48194949:1;401/chr7:4816:chr7:157477728-157477553:2;402/chr7:4816:chr7:157
477728-157477553:1;403/chr22:1858:chr22:46480950-46480793:2;404/chr22:1858:chr22:46480950-46480793:
1;405/chr16:2477:chr16:54971887-54971737:2;406/chr16:2477:chr16:54971887-54971737:1;407/chr15:867:chr
15:53097714-53097557:2;408/chr15:867:chr15:53097714-53097557:1;409/chr5:2559:chr5:140871443-1408712
74:2;410/chr5:2559:chr5:140871443-140871274:1;411/chr1:4300:chr1:59042013-59041841:2;412/chr1:4300:ch
r1:59042013-59041841:1;413/chr12:1125:chr12:52215875-52215707:2;414/chr12:1125:chr12:52215875-52215
707:1;415/chr13:1184:chr13:109792924-109792792:2;416/chr13:1184:chr13:109792924-109792792:1;417/chr1
9:4004:chr19:48983973-48983798:2;418/chr19:4004:chr19:48983973-48983798:1;419/chr10:1246:chr10:43600
436-43600276:2;420/chr10:1246:chr10:43600436-43600276:1;421/chr1:4108:chr1:53308724-53308568:2;422/c
hr1:4108:chr1:53308724-53308568:1;423/chr3:1010:chr3:45187585-45187418:2;424/chr3:1010:chr3:45187585-
45187418:1;425/chr19:1717:chr19:13409497-13409361:2;426/chr19:1717:chr19:13409497-13409361:1;427/ch
r6:138:chr6:1614970-1614818:2;428/chr6:138:chr6:1614970-1614818:1;429/chr9:3751:chr9:140681330-14068
1159:1;430/chr17:2823:chr17:59529371-59529196:2;431/chr17:2823:chr17:59529371-59529196:1;432/chr15:2
091:chr15:91427666-91427519:2;433/chr15:2091:chr15:91427666-91427519:1;434/chr7:405:chr7:1276323-127
6152:2;435/chr7:405:chr7:1276323-1276152:1;436/chr19:4075:chr19:49575723-49575570:2;437/chr19:4075:ch
r19:49575723-49575570:1;438/chr8:42:chr8:688810-688660:2;439/chr8:42:chr8:688810-688660:1;440/chr3:10
10:chr3:45188219-45188047:1;441/chr12:3097:chr12:130648449-130648282:2;442/chr12:3097:chr12:1306484
49-130648282:1;443/chr19:2639:chr19:30866221-30866047:2;444/chr19:2639:chr19:30866221-30866047:1;44
5/chr3:2172:chr3:124860818-124860646:2;446/chr3:2172:chr3:124860818-124860646:1;447/chr5:1864:chr5:80
256326-80256157:2;448/chr5:1864:chr5:80256326-80256157:1;449/chr19:1696:chr19:13210149-13209979:2;4
50/chr19:1696:chr19:13210149-13209979:1;451/chr8:791:chr8:15397803-15397628:2;452/chr8:791:chr8:15397
803-15397628:1;453/chr10:2698:chr10:102587280-102587146:2;454/chr10:2698:chr10:102587280-102587146:
1;455/chr16:679:chr16:2287070-2286919:2;456/chr7:1497:chr7:27155280-27155120:2;457/chr7:1536:chr7:272
05908-27205733:2;458/chr7:1536:chr7:27205908-27205733:1;459/chr16:679:chr16:2287070-2286919:1;460/ch
r7:1497:chr7:27155280-27155120:1;461/chr1:604:chr1:2461567-2461430:2;462/chr1:604:chr1:2461567-24614
30:1;463/chr18:1153:chr18:70534486-70534312:2;464/chr18:1153:chr18:70534486-70534312:1;465/chr3:1611:
chr3:65342234-65342081:2;466/chr3:1611:chr3:65342234-65342081:1;467/chr11:1079:chr11:6651650-665148
4:2;468/chr11:1079:chr11:6651650-6651484:1;469/chr1:5882:chr1:180202481-180202309:2;470/chr1:5882:chr
1:180202481-180202309:1;471/chr1:254:chr1:1567020-1566850:2;472/chr1:254:chr1:1567020-1566850:1;473/
cg14455998:chr7:133811940-133811768:1;474/chr14:847:chr14:69095416-69095241:2;475/chr7:3500:chr7:12
7671519-127671351:2;476/chr7:3500:chr7:127671519-127671351:1;477/chr14:847:chr14:69095416-69095241:
1;478/chr20:2719:chr20:61703616-61703454:2;479/chr20:2719:chr20:61703616-61703454:1;480/chr8:1701:chr
8:54163459-54163292:2;481/chr8:1701:chr8:54163459-54163292:1;482/chr17:2281:chr17:44897033-44896861:
2;483/chr5:1664:chr5:66462741-66462568:2;484/chr5:1664:chr5:66462741-66462568:1;485/cg09360501:chr1
9:22019096-22018924:1;486/chr5:1434:chr5:42952324-42952151:2;487/chr17:2799:chr17:59474326-59474160:
2;488/chr17:2799:chr17:59474326-59474160:1;489/chr4:1664:chr4:40859350-40859177:2;490/chr4:1664:chr4:
40859350-40859177:1;491/chr12:307:chr12:4919217-4919078:2;492/chr12:307:chr12:4919217-4919078:1;493/
chr9:1226:chr9:100616810-100616659:2;494/chr9:1226:chr9:100616810-100616659:1;495/chr5:1434:chr5:429
52324-42952151:1;496/chr2:525:chr2:3751410-3751244:2;497/chr2:525:chr2:3751410-3751244:1;498/chr4:127
2:chr4:8863888-8863725:2;499/chr4:1272:chr4:8863888-8863725:1;500/chr17:4139:chr17:77788965-77788791:
2;501/chr17:4139:chr17:77788965-77788791:1;502/chr15:1553:chr15:76635583-76635420:2;503/chr15:1553:c
hr15:76635583-76635420:1;504/chr5:1172:chr5:15500436-15500269:2;505/chr5:1172:chr5:15500436-1550026
9:1;506/chr17:2281:chr17:44897033-44896861:1;507/chr1:59:chr1:969452-969286:2;508/chr1:59:chr1:969452-
969286:1;509/chr2:2750:chr2:105459768-105459599:2;510/chr2:2750:chr2:105459768-105459599:1;511/chr7:
1858:chr7:37487561-37487390:2;512/chr7:1858:chr7:37487561-37487390:1;513/chr4:2610:chr4:155665124-15
5664949:2;514/chr4:2610:chr4:155665124-155664949:1;515/chr19:551:chr19:2251307-2251141:2;516/chr19:5
51:chr19:2251307-2251141:1;517/chr5:3119:chr5:170736998-170736824:2;518/chr5:3119:chr5:170736998-170
736824:1;519/chr8:2236:chr8:99952450-99952290:2;520/chr8:2236:chr8:99952450-99952290:1;521/chr2:2631:
chr2:99439453-99439305:2;522/chr2:2631:chr2:99439453-99439305:1;523/chr1:4838:chr1:110754955-110754
788:2;524/chr1:4838:chr1:110754955-110754788:1;525/chr12:1258:chr12:54071277-54071152:2;526/chr12:12
58:chr12:54071277-54071152:1;527/chr16:2511:chr16:55358398-55358271:2;528/chr16:2511:chr16:55358398-
55358271:1;529/chr21:1265:chr21:47062845-47062720:2;530/chr21:1265:chr21:47062845-47062720:1;531/chr
6:2182:chr6:101851019-101850850:2;532/chr6:2182:chr6:101851019-101850850:1;533/chr15:523:chr15:37172
741-37172571:2;534/chr15:523:chr15:37172741-37172571:1;535/chr6:1985:chr6:85484520-85484393:2;536/ch
r6:1985:chr6:85484520-85484393:1;537/chr20:1322:chr20:43727361-43727195:2;538/chr20:1322:chr20:43727
361-43727195:1;539/chr8:941:chr8:21647516-21647385:2;540/chr8:941:chr8:21647516-21647385:1;541/chr18:
765:chr18:44337902-44337746:2;542/chr18:765:chr18:44337902-44337746:1;543/chr7:562:chr7:1626134-1625
961:2;544/chr7:562:chr7:1626134-1625961:1;545/chr13:1468:chr13:112727908-112727782:2;546/chr13:1468:c
hr13:112727908-112727782:1;547/chr11:2460:chr11:64815221-64815088:2;548/chr11:2460:chr11:64815221-6
4815088:1;549/chr12:1282:chr12:54346064-54345892:2;550/chr12:1282:chr12:54346064-54345892:1;551/cg1
0471437:chr16:28074607-28074451:2;552/cg10471437:chr16:28074607-28074451:1;553/chr5:2392:chr5:1352
66327-135266164:2;554/chr5:2392:chr5:135266327-135266164:1;555/cg03257172:chr1:200010306-20001013
7:1;556/chr7:1552:chr7:27225329-27225188:2;557/chr8:1403:chr8:38757738-38757583:1;558/cg13432708:chr
4:4388612-4388440:2;559/cg13432708:chr4:43886124388440:1;560/chr6:789:chr6:27725301-27725157:2;561/
chr12:1318:chr12:54427265-54427095:2;562/chr2:597:chr2:5832275-5832109:2;563/chr15:1198:chr15:681194
62-68119300:2;564/chr15:1198:chr15:68119462-68119300:1;565/chr12:1318:chr12:54427265-54427095:1;566/
chr2:597:chr2:5832275-5832109:1;567/chr9:1081:chr9:96721556-96721405:2;568/chr9:1081:chr9:96721556-96
721405:1;569/chr1:3851:chr1:44873440-44873315:2;570/chr1:3851:chr1:44873440-44873315:1;571/chr1:5180:
chr1:151810817-151810653:2;572/chr1:5180:chr1:151810817-151810653:1;573/chr2:1181:chr2:24232980-242
32828:2;574/chr2:1181:chr2:24232980-24232828:1;575/chr2:4268:chr2:177016548-177016375:2;576/chr2:426
8:chr2:177016548-177016375:1;577/chr4:5:chr4:107599-107466:2;578/chr4:5:chr4:107599-107466:1;579/chr17:
275:chr17:1960855-1960723:2;580/chr17:275:chr17:1960855-1960723:1;581/chr15:219:chr15:27216564-2721
6427:2;582/chr15:219:chr15:27216564-27216427:1;583/chr13:1687:chr13:113699673-113699501:2;584/chr19:
830:chr19:3786359-3786184:2;585/chr15:260:chr15:28342343-28342201:2;586/chr15:260:chr15:28342343-283
42201:1;587/chr7:3315:chr7:103630408-103630249:2;588/chr7:3315:chr7:103630408-103630249:1;589/chr5:3
993:chr5:180486753-180486590:2;590/chr5:3993:chr5:180486753-180486590:1;591/chr22:2727:chr22:507385
60-50738390:2;592/chr22:2727:chr22:50738560-50738390:1;593/chr8:1876:chr8:65282188-65282052:2;594/ch
r8:1876:chr8:65282188-65282052:1;595/chr5:1434:chr5:42952230-42952059:2;596/chr5:1434:chr5:42952230-
42952059:1;597/chr11:389:chr11:1578414-1578271:2;598/chr17:537:chr17:4804204-4804043:2;599/chr9:402:c
hr9:36739888-36739756:2;600/chr9:402:chr9:36739888-36739756:1;601/chr3:823:chr3:37494343-37494176:2;
602/chr3:823:chr3:37494343-37494176:1;603/chr10:3172:chr10:118894210-118894054:2;604/chr10:3172:chr1
0:118894210-118894054:1;605/chr12:1084:chr12:50297975-50297804:2;606/chr12:1084:chr12:50297975-5029
7804:1;607/chr17:2535:chr17:48546150-48546021:2;608/chr17:2535:chr17:48546150-48546021:1;609/chr18:1
06:chr18:5891142-5891001:2;610/chr18:106:chr18:5891142-5891001:1;611/chr16:224:chr16:1024589-1024418:
2;612/chr19:3997:chr19:48946382-48946227:2;613/chr19:3997:chr19:48946382-48946227:1;614/chr17:1003:c
hr17:11144079-11143912:2;615/chr17:1003:chr17:11144079-11143912:1;616/chr9:1226:chr9:100617150-1006
17003:2;617/chr9:1226:chr9:100617150-100617003:1;618/chr22:2764:chr22:50987475-50987303:2;619/chr10:
3240:chr10:119494662-119494502:2;620/chr10:3240:chr10:119494662-119494502:1;621/chr7:1376:chr7:2324
5923-23245776:2;622/chr15:2015:chr15:89952790-89952620:1;623/chr6:2182:chr6:101850697-101850525:1;6
24/chr17:1855:chr17:36666963-36666805:2;625/chr5:3993:chr5:180486893-180486726:2;626/chr5:3993:chr5:1
80486893-180486726:1;627/chr8:1408:chr8:38965351-38965177:2;628/chr8:1408:chr8:38965351-38965177:1;
629/chr10:4270:chr10:133110301-133110163:2;630/chr10:4270:chr10:133110301-133110163:1;631/chr1:6544:
chr1:214153480-214153323:2;632/chr1:6544:chr1:214153480-214153323:1;633/chr4:2508:chr4:147576330-14
7576168:2;634/chr4:2508:chr4:147576330-147576168:1;635/chr7:4724:chr7:157072115-157071948:2;636/chr7:
4724:chr7:157072115-157071948:1;637/chr12:3094:chr12:130646863-130646696:2;638/chr12:3094:chr12:130
646863-130646696:1;639/chr17:1855:chr17:36666963-36666805:1;640/chr19:1717:chr19:13409607-13409433:
2;641/chr19:1717:chr19:13409607-13409433:1;642/chr6:1972:chr6:84419152-84418977:2;643/chr6:1972:chr6:
84419152-84418977:1;644/chr4:1747:chr4:48485548-48485417:2;645/chr4:1747:chr4:48485548-48485417:1;6
46/chr12:1462:chr12:58131732-58131563:2;647/chr12:1462:chr12:58131732-58131563:1;648/chr16:224:chr16:
1024589-1024418:1;649/chr19:368:chr19:1469199-1469031:2;650/chr19:368:chr19:1469199-1469031:1;651/ch
r2:257:chr2:1747345-1747170:2;652/chr2:257:chr2:1747345-1747170:1;653/chr22:2764:chr22:50987475-5098
7303:1;654/chr7:4109:chr7:150655660-150655489:2;655/chr7:4109:chr7:150655660-150655489:1;656/chr7:13
76:chr7:23245923-23245776:1;657/chr4:637:chr4:3769495-3769348:2;658/chr4:637:chr4:3769495-3769348:1;6
59/chr1:4827:chr1:110613313-110613165:2;660/chr1:4827:chr1:110613313-110613165:1;661/chr13:714:chr13:
53421515-53421349:2;662/chr13:714:chr13:53421515-53421349:1;663/chr1:4913:chr1:113287108-113286975:
2;664/chr1:4913:chr1:113287108-113286975:1;665/chr12:1757:chr12:95942707-95942574:2;666/chr12:1757:c
hr12:95942707-95942574:1;667/chr16:4191:chr16:88701237-88701108:2;668/chr16:4191:chr16:88701237-887
01108:1;669/chr12:2984:chr12:129338120-129337948:2;670/chr12:2984:chr12:129338120-129337948:1;671/c
hr2:1560:chr2:42720600-42720440:2;672/chr18:1046:chr18:56941329-56941156:2;673/chr18:1046:chr18:5694
1329-56941156:1;674/chr2:1560:chr2:4272060042720440:1;675/chr2:259:chr2:1748325-1748159:2;676/chr17:
2349:chr17:46604643-46604494:2;677/chr17:2349:chr17:46604643-46604494:1;678/chr17:1004:chr17:111449
43-11144805:2;679/chr17:1004:chr17:11144943-11144805:1;680/chr2:259:chr2:1748325-1748159:1;681/chr15:
2253:chr15:95388449-95388283:2;682/chr15:2253:chr15:95388449-95388283:1;683/chr7:1552:chr7:27225329-
27225188:1;684/chr13:1458:chr13:112722066-112721911:2;685/chr13:1458:chr13:112722066-112721911:1;68
6/chr18:91:chr18:5543242-5543067:2;687/chr18:91:chr18:5543242-5543067:1;688/chr16:74:chr16:610817-610
648:2;689/chr16:74:chr16:610817-610648:1;690/chr6:86:chr6:1312460-1312285:2;691/chr6:86:chr6:1312460-1
312285:1;692/chr6:789:chr6:27725301-27725157:1;693/chr10:4942:chr10:135193098-135192933:2;694/chr10:
4942:chr10:135193098-135192933:1;695/chr11:2620:chr11:66885578-66885411:2;696/chr11:2620:chr11:6688
5578-66885411:1;697/chr16:4191:chr16:88700886-88700720:2;698/chr16:4191:chr16:88700886-88700720:1;6
99/chr1:59:chr1:969070-968901:2;700/chr1:59:chr1:969070-968901:1;701/chr1:4547:chr1:85514129-85513954:
2;702/chr1:4547:chr1:85514129-85513954:1;703/chr1:1408:chr1:4715328-4715192:2;704/chr1:1408:chr1:4715
328-4715192:1;705/chr12:428:chr12:6664597-6664426:2;706/chr12:428:chr12:6664597-6664426:1;707/chr16:2
389:chr16:51186360-51186234:2;708/chr16:2389:chr16:51186360-51186234:1;709/chr1:1408:chr1:4714681-47
14541:2;710/chr1:1408:chr1:4714681-4714541:1;711/chr3:3517:chr3:196255871-196255701:2;712/chr3:3517:c
hr3:196255871-196255701:1;713/chr13:1687:chr13:113699673-113699501:1;714/chr4:1272:chr4:8863594-886
3462:2;715/chr4:1272:chr4:8863594-8863462:1;716/chr7:1307:chr7:19156981-19156840:2;717/chr7:1307:chr7:
19156981-19156840:1;718/chr15:839:chr15:52405049-52404876:2;719/chr15:839:chr15:52405049-52404876:1;
720/chr11:320:chr11:1411918-1411750:2;721/chr11:320:chr11:1411918-1411750:1;722/chr19:830:chr19:3786
359-3786184:1;723/chr1:1408:chr1:4714986-4714816:2;724/chr1:1408:chr1:4714986-4714816:1;725/chr19:169
6:chr19:13210215-13210088:2;726/chr19:1696:chr19:13210215-13210088:1;727/chr13:85:chr13:20875922-208
75760:2;728/chr13:85:chr13:20875922-20875760:1;729/chr6:99:chr6:1384254-1384099:2;730/chr6:99:chr6:138
4254-1384099:1;731/chr5:1826:chr5:77806363-77806192:2;732/chr5:1826:chr5:77806363-77806192:1;733/chr
10:3445:chr10:124896916-124896777:2;734/chr10:3445:chr10:124896916-124896777:1;735/chr11:389:chr11:1
578414-1578271:1;736/chr17:537:chr17:4804204-4804043:1;737/chr3:5:chr3:239100-238936:2;738/chr3:5:chr3:
239100-238936:1;739/chr10:2308:chr10:88123111-88122936:2;740/chr10:2308:chr10:88123111-88122936:1;7
41/chr21:333:chr21:38081666-38081528:2;742/chr21:333:chr21:38081666-38081528:1;743/chr1:4640:chr1:913
01915-91301785:2;744/chr1:4640:chr1:91301915-91301785:1;745/chr5:1789:chr5:76373422-76373260:2;746/c
hr5:1789:chr5:76373422-76373260:1;747/chr7:4820:chr7:157481855-157481686:2;748/chr7:4820:chr7:157481
855-157481686:1;749/chr2:4262:chr2:176994812-176994654:2;750/chr2:4262:chr2:176994812-176994654:1;7
51/chr3:2753:chr3:147111581-147111456:2;752/chr3:2753:chr3:147111581-147111456:1;753/chr1:4838:chr1:1
10754666-110754532:2;754/chr1:4838:chr1:110754666-110754532:1;755/chr5:2560:chr5:140872047-1408719
11:2;756/chr5:2560:chr5:140872047-140871911:1;757/chr16:2882:chr16:67428666-67428530:2;758/chr16:288
2:chr16:67428666-67428530:1;759/chr6:1322:chr6:35992413-35992248:2;760/chr6:1322:chr6:35992413-35992
248:1;761/chr17:1316:chr17:19628181-19628024:2;762/chr17:1316:chr17:19628181-19628024:1;763/chr3:823:
chr3:37494467-37494341:2;764/chr3:823:chr3:37494467-37494341:1;765/chr11:4686:chr11:130067781-13006
7608:2;766/chr9:60:chr9:1051743-1051568:2;767/chr9:60:chr9:1051743-1051568:1;768/chr11:4686:chr11:1300
67781-130067608:1;769/chr20:1878:chr20:55965360-55965187:2;770/chr20:1878:chr20:55965360-55965187:1;
771/chr5:2559:chr5:140871367-140871209:2;772/chr5:2559:chr5:140871367-140871209:1;773/chr11:296:chr1
1:1358676-1358546:2;774/chr11:296:chr11:1358676-1358546:1;775/chr10:2401:chr10:94449587-94449453:2;7
76/chr10:2401:chr10:94449587-94449453:1;777/chr4:123:chr4:997013-996870:2;778/chr4:123:chr4:997013-99
6870:1;779/chr9:1080:chr9:96720974-96720799:2;780/chr9:1080:chr9:96720974-96720799:1;781/chr10:2315:c
hr10:88127439-88127279:2;782/chr10:2315:chr10:88127439-88127279:1;783/chr18:989:chr18:55019875-5501
9712:2;784/chr21:1253:chr21:47010310-47010150:1;785/chr7:3763:chr7:139167913-139167769:2;786/chr7:37
63:chr7:139167913-139167769:1;787/chr7:1543:chr7:27213116-27212965:2;788/chr7:1543:chr7:27213116-272
12965:1;789/chr2:4772:chr2:220313573-220313429:2;790/chr2:4772:chr2:220313573-220313429:1;791/chr22:
161:chr22:19711159-19710984:2;792/chr22:161:chr22:19711159-19710984:1;793/chr6:1788:chr6:54711761-54
711632:2;794/chr6:1788:chr6:54711761-54711632:1;795/chr19:3621:chr19:42703810-42703641:1;796/chr10:31
80:chr10:118899850-118899718:2;797/chr10:3180:chr10:118899850-118899718:1;798/chr13:1458:chr13:112
721977-112721835:2;799/chr13:1458:chr13:112721977-112721835:1;800/chr7:562:chr7:1626359-1626234:2;8
01/chr7:562:chr7:1626359-1626234:1;802/chr17:273:chr17:1959936-1959811:2;803/chr17:273:chr17:1959936-
1959811:1;804/chr10:1049:chr10:30024665-30024512:2;805/chr10:1049:chr10:30024665-30024512:1;806/chr1
0:2024:chr10:77156975-77156850:2;807/chr10:2024:chr10:77156975-77156850:1;808/chr12:1090:chr12:50355
164-50355023:2;809/chr1:7109:chr1:234040945-234040813:2;810/chr1:7109:chr1:234040945-234040813:1;81
1/chr12:1090:chr12:50355164-50355023:1;812/chr15:839:chr15:52404728-52404567:2;813/chr15:839:chr15:52
404728-52404567:1;814/chr11:1079:chr11:6651865-6651739:2;815/chr11:1079:chr11:6651865-6651739:1;816/
chr22:1246:chr22:40045741-40045566:1;817/chr13:1456:chr13:112721241-112721116:2;818/chr13:1456:chr13:
112721241-112721116:1;819/chr19:3321:chr19:39086994-39086826:2;820/chr19:3321:chr19:39086994-39086
826:1;821/chr18:1609:chr18:76739213-76739058:2;822/chr7:1568:chr7:27260502-27260331:2;823/chr7:1568:c
hr7:27260502-27260331:1;824/chr18:1609:chr18:76739213-76739058:1;825/chr8:1959:chr8:70946981-709468
17:2;826/chr10:2740:chr10:102900355-102900186:2;827/chr11:1427:chr11:20385333-20385195:2;828/chr11:1
427:chr11:20385333-20385195:1;829/chr10:2740:chr10:102900355-102900186:1;830/chr11:2620:chr11:66885
940-66885789:2;831/chr11:2620:chr11:66885940-66885789:1;832/chrX:666:chrX:39864870-39864699:2;833/c
hrX:666:chrX:39864870-39864699:1;834/chr8:1959:chr8:70946981-70946817:1;835/chrX:678:chrX:39949547-3
9949372:2;836/chrX:678:chrX:39949547-39949372:1;837/chr1:691:chr1:2777505-2777378:2;838/chr1:691:chr1:
2777505-2777378:1;839/chr10:846:chr10:21789327-21789154:2;840/chr10:846:chr10:21789327-21789154:1;8
41/chr1:7412:chr1:248020840-248020670:2;842/chr1:7412:chr1:248020840-248020670:1;843/chr2:4122:chr2:1
72948274-172948103:2;844/chr2:4122:chr2:172948274-172948103:1;845/chr19:4862:chr19:58038848-580386
73:2;846/chr19:4862:chr19:58038848-58038673:1;847/chr18:1256:chr18:73628544-73628399:2;848/chr18:125
6:chr18:73628544-73628399:1;849/chr10:4898:chr10:135052157-135051986:2;850/chr10:4898:chr10:1350521
57-135051986:1;851/chr20:732:chr20:25129250-25129125:2;852/chr20:732:chr20:25129250-25129125:1;853/c
hr5:2392:chr5:135266648-135266505:2;854/chr5:2392:chr5:135266648-135266505:1;855/chr13:1184:chr13:10
9793673-109793539:2;856/chr13:1184:chr13:109793673-109793539:1;857/chr10:4732:chr10:134844916-1348
44745:2;858/chr10:4732:chr10:134844916-134844745:1;859/chr9:3509:chr9:139741633-139741490:2;860/chr9:
3509:chr9:139741633-139741490:1;861/chr8:1701:chr8:54163588-54163457:2;862/chr8:1701:chr8:54163588-
54163457:1;863/chr1:3957:chr1:47904941-47904774:2;864/chr1:3957:chr1:47904941-47904774:1;865/chr19:4
216:chr19:50861948-50861773:2;866/chr19:4216:chr19:50861948-50861773:1;867/chr19:4796:chr19:5698901
0-56988868:2;868/chr19:4796:chr19:56989010-56988868:1;869/chr4:202:chr4:1398790-1398615:2;870/chr4:20
2:chr4:1398790-1398615:1;871/cg15344220:chr11:8040582-8040407:2;872/cg15344220:chr11:8040582-80404
07:1;873/chr11:5:chr11:280536-280381:2;874/chr11:5:chr11:280536-280381:1;875/chr19:3621:chr19:42703748-
42703577:2;876/chr19:3621:chr19:42703748-42703577:1;877/chr4:1750:chr4:48493326-48493161:2;878/chr4:
1750:chr4:48493326-48493161:1;879/chr15:275:chr15:29131520-29131346:2;880/chr15:275:chr15:29131520-2
9131346:1;881/chr7:1533:chr7:27205115-27204944:2;882/chr7:1533:chr7:27205115-27204944:1;883/chr16:11
2:chr16:745332-745166:2;884/chr5:3916:chr5:180018219-180018091:2;885/chr5:3916:chr5:180018219-180018
091:1;886/chr16:112:chr16:745332-745166:1;887/chr20:134:chr20:2673091-2672939:2;888/chr20:134:chr20:26
73091-2672939:1;889/chr10:906:chr10:23481389-23481221:1;890/chr9:402:chr9:36739816-36739691:2;891/ch
r9:402:chr9:36739816-36739691:1;892/chr5:2489:chr5:139228292-139228144:2;893/chr5:2489:chr5:13922829
2-139228144:1;894/chr18:503:chr18:24130644-24130486:2;895/chr18:503:chr18:24130644-24130486:1;896/ch
r8:263:chr8:1444022-1443847:2;897/chr8:263:chr8:1444022-1443847:1;898/chr17:4148:chr17:77814401-7781
4276:2;899/chr17:4148:chr17:77814401-77814276:1;900/chr19:2488:chr19:29284801-29284634:2;901/chr19:2
488:chr19:29284801-29284634:1;902/chr3:2394:chr3:128274390-128274215:2;903/chr3:2394:chr3:128274390-
128274215:1;904/chr20:2210:chr20:59827833-59827677:2;905/chr20:2210:chr20:59827833-59827677:1;906/c
hr14:2327:chr14:104622286-104622118:2;907/chr14:2327:chr14:104622286-104622118:1;908/chr4:759:chr4:5
710066-5709903:2;909/chr4:759:chr4:5710066-5709903:1;910/chr2:741:chr2:8816855-8816691:2;911/chr11:22
24:chr11:62212270-62212144:1;912/chr6:1985:chr6:85484648-85484498:2;913/chr6:1985:chr6:85484648-8548
4498:1;914/chr2:741:chr2:8816855-8816691:1;915/chr3:2629:chr3:138658377-138658219:2;916/chr3:2629:chr
3:138658377-138658219:1;917/cg07710481:chr13:88325462-88325302:1;918/chr20:136:chr20:2674782-26746
44:2;919/chr18:776:chr18:44774139-44773967:2;920/chr18:776:chr18:44774139-44773967:1;921/chr20:136:ch
r20:2674782-2674644:1;922/chr8:2051:chr8:80804255-80804087:2;923/chr8:2051:chr8:80804255-80804087:1;
924/chrX:503:chrX:21676440-21676273:2;925/chrX:503:chrX:21676440-21676273:1;926/chr16:1124:chr16:910
7288-9107124:1;927/chr20:620:chr20:23029611-23029456:2;928/chr2:4233:chr2:176972745-176972591:2;929/
chr2:4233:chr2:176972745-176972591:1;930/cg15778745:chr13:88324623-88324465:2;931/eg15778745:chr13:
88324623-88324465:1;932/chr13:100:chr13:21296008-21295833:2;933/chr10:848:chr10:21799349-21799198:
2;934/chr10:848:chr10:21799349-21799198:1;935/chr19:367:chr19:1467934-1467793:2;936/chr19:367:chr19:1
467934-1467793:1;937/chr2:38:chr2:468520-468356:2;938/chr19:4654:chr19:55598756-55598631:2;939/chr20:
1833:chr20:55500445-55500279:2;940/chr7:1908:chr7:39649532-39649358:2;941/chr7:1908:chr7:39649532-39
649358:1;942/chr4:2703:chr4:172734459-172734312:2;943/chr17:2176:chr17:43045392-43045228:1;944/chr18:
1804:chr18:77389578-77389404:2;945/chr8:13:chr8:494891-494765:2;946/chr8:13:chr8:494891-494765:1;947/
chr17:1814:chr17:35300168-35299994:2;948/chr14:363:chr14:37136352-37136182:2;949/chr19:4654:chr19:55
598756-55598631:1;950/chr21:102:chr21:28338043-28337869:2;951/chr21:102:chr21:28338043-28337869:1;9
52/chr1:971:chr1:3155348-3155173:2;953/chr1:971:chr1:3155348-3155173:1;954/chr2:4127:chr2:172954828-1
72954655:1;955/chr11:4458:chr11:125036547-125036399:2;956/chr11:1427:chr11:20385438-20385265:2;957/
chr6:1985:chr6:85484335-85484208:2;958/chr12:1112:chr12:51718045-51717920:2;959/chr12:1112:chr12:517
18045-51717920:1;960/chr9:3255:chr9:139024824-139024679:2;961/chr9:3255:chr9:139024824-139024679:1;
962/chr5:1949:chr5:92940228-92940090:1;963/chr6:1567:chr6:42072403-42072258:2;964/chr6:1567:chr6:4207
2403-42072258:1;965/chr12:3095:chr12:130647408-130647283:2;966/chr12:3095:chr12:130647408-13064728
3:1;967/chr4:1288:chr4:8895327-8895159:2;968/chr22:1515:chr22:43807550-43807412:2;969/chr22:1515:chr2
2:43807550-43807412:1;970/chr18:1150:chr18:70209552-70209377:2;971/chr18:1150:chr18:70209552-702093
77:1;972/chr12:1169:chr12:52627367-52627205:2;973/chr11:105:chr11:640276-640122:2;974/chr11:105:chr11:
640276-640122:1;975/chr17:2778:chr17:58227629-58227469:2;976/chr1:1254:chr1:3567760-3567621:1;977/ch
r18:763:chr18:44337035-44336860:2;978/chr5:3347:chr5:175224373-175224225:2;979/chr5:3347:chr5:175224
373-175224225:1;980/chr5:1719:chr5:72678238-72678084:2;981/chr5:1719:chr5:72678238-72678084:1;982/ch
r14:343:chr14:37116730-37116572:2;983/chr14:2041:chr14:101925384-101925236:2;984/chr14:2041:chr14:10
1925384-101925236:1;985/chr16:234:chr16:1035465-1035307:2;986/chr16:234:chr16:1035465-1035307:1;987/
chr7:4544:chr7:155596079-155595930:2;988/chr7:4544:chr7:155596079-155595930:1;989/chr16:1569:chr16:2
2825758-22825609:2;990/chr16:1569:chr16:22825758-22825609:1;991/chr13:368:chr13:28674805-28674668:2;
992/chr13:368:chr13:28674805-28674668:1;993/chr18:1613:chr18:76740511-76740349:2;994/chr18:1613:chr1
8:76740511-76740349:1;995/chr22:1515:chr22:43807805-43807680:2;996/chr22:1515:chr22:43807805-438076
80:1;997/chr7:1858:chr7:37487837-37487671:1;998/chr7:282:chr7:751906-751765:2;999/chr7:282:chr7:751906-
751765:1;1000/chr17:2778:chr17:58227629-58227469:1;1001/chr5:838:chr5:3600857-3600685:2;1002/chr5:83
8:chr5:3600857-3600685:1;1003/chr18:763:chr18:44337035-44336860:1;1004/chr14:343:chr14:37116730-3711
6572:1;1005/chr19:567:chr19:2291026-2290868:2;1006/chr19:567:chr19:2291026-2290868:1;1007/chr5:2324:c
hr5:134363943-134363791:2;1008/chr5:2324:chr5:134363943-134363791:1;1009/chr14:1435:chr14:93154393-
93154237:2;1010/chr14:1435:chr14:93154393-93154237:1;1011/chr11:389:chr11:1578154-1578018:2;1012/chr
11:389:chr11:1578154-1578018:1;1013/chr11:4458:chr11:125036547-125036399:1;1014/chr12:2890:chr12:127
211367-127211206:2;1015/chr12:2890:chr12:127211367-127211206:1;1016/chr11:1427:chr11:20385438-2038
5265:1;1017/chr6:1985:chr6:85484335-85484208:1;1018/chr17:965:chr17:10102074-10101912:2;1019/chr17:9
65:chr17:10102074-10101912:1;1020/chr7:4817:chr7:157478309-157478184:2;1021/chr7:4817:chr7:15747830
9-157478184:1;1022/chr2:3107:chr2:115919030-115918868:2;1023/chr2:3107:chr2:115919030-115918868:1;1
024/chr14:586:chr14:57275916-57275777:2;1025/chr14:586:chr14:57275916-57275777:1;1026/chr19:4075:chr
19:49576064-49575897:2;1027/chr19:4075:chr19:49576064-49575897:1;1028/chr4:1288:chr4:8895327-889515
9:1;1029/chr17:4511:chr17:79615343-79615170:2;1030/chr17:4511:chr17:79615343-79615170:1;1031/chr5:83
0:chr5:3596349-3596188:2;1032/chr5:830:chr5:3596349-3596188:1;1033/chr10:983:chr10:28034954-28034829:
2;1034/chr10:983:chr10:28034954-28034829:1;1035/chr3:1614:chr3:65535276-65535103:2;1036/chr3:1614:ch
r3:65535276-65535103:1;1037/chr14:2099:chr14:102172394-102172221:2;1038/chr14:2099:chr14:102172394-
102172221:1;1039/chr12:1169:chr12:52627367-52627205:1;1040/chr6:1746:chr6:50818431-50818259:2;1041/
chr6:1746:chr6:50818431-50818259:1;1042/chr19:1946:chr19:16436639-16436493:2;1043/chr19:1946:chr19:1
6436639-16436493:1;1044/chr12:1140:chr12:52301350-52301213:2;1045/chr12:1140:chr12:52301350-523012
13:1;1046/chr12:2587:chr12:122016613-122016440:2;1047/chr12:2587:chr12:122016613-122016440:1;1048/c
hr3:333:chr3:13115130-13115000:2;1049/chr3:333:chr3:13115130-13115000:1;1050/chr3:2382:chr3:12821090
1-128210726:2;1051/chr3:2382:chr3:128210901-128210726:1;1052/chr3:2384:chr3:128211778-128211603:1;1
053/chr19:3997:chr19:48946258-48946107:2;1054/chr19:3997:chr19:48946258-48946107:1;1055/chr1:3196:ch
r1:29102083-29101911:2;1056/chr1:3196:chr1:29102083-29101911:1;1057/chr18:1835:chr18:77548423-77548
256:2;1058/chr18:1835:chr18:77548423-77548256:1;1059/chr11:2133:chr11:61277255-61277115:2;1060/chr11:
2133:chr11:61277255-61277115:1;1061/chr6:380:chr6:10382089-10381934:2;1062/chr6:380:chr6:10382089-1
0381934:1;1063/chr4:1290:chr4:8895839-8895689:2;1064/chr18:765:chr18:44338199-44338045:2;1065/chr18:
765:chr18:44338199-44338045:1;1066/chr10:1049:chr10:30024548-30024417:2;1067/chr10:1049:chr10:30024
548-30024417:1;1068/cg08521987:chr10:119000955-119000814:1;1069/chr7:873:chr7:3341384-3341224:2;10
70/chr7:873:chr7:3341384-3341224:1;1071/chr2:3708:chr2:131721444-131721299:2;1072/chr2:3708:chr2:1317
21444-131721299:1;1073/chr4:1290:chr4:8895839-8895689:1;1074/chr4:2602:chr4:155411561-155411399:2;1
075/chr4:2602:chr4:155411561-155411399:1;1076/chr2:4224:chr2:176957850-176957713:2;1077/chr2:4224:ch
r2:176957850-176957713:1;1078/chr9:2143:chr9:132651075-132650918:1;1079/chr11:2420:chr11:64428600-6
4428433:2;1080/chr11:2420:chr11:64428600-64428433:1;1081/chr10:2138:chr10:81002139-81001995:2;1082/
chr10:2138:chr10:81002139-81001995:1;1083/chr6:98:chr6:1383867-1383692:2;1084/chr6:98:chr6:1383867-13
83692:1;1085/chr17:4139:chr17:77789183-77789053:2;1086/chr17:4139:chr17:77789183-77789053:1;1087/chr
17:658:chr17:6899650-6899489:2;1088/chr17:658:chr17:6899650-6899489:1;1089/chr6:596:chr6:19837625-19
837468:2;1090/chr6:596:chr6:19837625-19837468:1;1091/chr2:118:chr2:946865-946706:2;1092/chr2:118:chr2:
946865-946706:1;1093/chr1:1852:chr1:8277192-8277048:2;1094/chr1:1852:chr1:8277192-8277048:1;1095/chr
9:1287:chr9:102590791-102590666:2;1096/chr9:1287:chr9:102590791-102590666:1;1097/chr8:1107:chr8:2477
1208-24771045:2;1098/chr8:1107:chr8:24771208-24771045:1;1099/chr19:1696:chr19:13210537-13210412:2;1
100/chr19:1696:chr19:13210537-13210412:1;1101/chr22:295:chr22:20780522-20780352:2;1102/chr22:295:chr
22:20780522-20780352:1;1103/chr1:604:chr1:2461653-2461488:2;1104/chr1:604:chr1:2461653-2461488:1;110
5/chr17:1558:chr17:28088493-28088329:2;1106/chr17:1558:chr17:28088493-28088329:1;1107/chr18:1609:chr
18:76739292-76739118:2;1108/chr18:1609:chr18:76739292-76739118:1;1109/chr14:2727:chr14:105715006-10
5714843:2;1110/chr14:2727:chr14:105715006-105714843:1;1111/chr14:627:chr14:59932154-59931989:2;1112/
chr14:627:chr14:59932154-59931989:1;1113/chr16:1299:chr16:12995863-12995736:2;1114/chr16:1299:chr16:
12995863-12995736:1;1115/chr1:7249:chr1:240256720-240256595:2;1116/chr1:7249:chr1:240256720-240256
595:1;1117/chr2:1926:chr2:63287004-63286866:2;1118/chr2:1926:chr2:63287004-63286866:1;1119/chr14:369:
chr14:37667305-37667159:2;1120/chr14:369:chr14:37667305-37667159:1;1121/chr7:1307:chr7:19157141-191
56967:2;1122/chr7:1307:chr7:19157141-19156967:1;1123/chr20:620:chr20:23029611-23029456:1;1124/chr8:8
09:chr8:17271163-17271004:2;1125/chr15:219:chr15:27216798-27216666:2;1126/chr15:219:chr15:27216798-2
7216666:1;1127/chr13:100:chr13:21296008-21295833:1;1128/chr6:1985:chr6:85484190-85484020:2;1129/chr6:
596:chr6:19837558-19837402:2;1130/chr2:38:chr2:468520-468356:1;1131/chr6:596:chr6:19837558-19837402:
1;1132/chr20:1833:chr20:55500445-55500279:1;1133/chr4:2703:chr4:172734459-172734312:1;1134/chr18:180
4:chr18:77389578-77389404:1;1135/chr13:100:chr13:21296134-21296008:2;1136/chr13:100:chr13:21296134-2
1296008:1;1137/chr17:1814:chr17:35300168-35299994:1;1138/chr14:379:chr14:38057530-38057362:2;1139/c
hr14:379:chr14:38057530-38057362:1;1140/chr14:363:chr14:37136352-37136182:1;1141/chr8:809:chr8:17271
163-17271004:1;1142/chr6:1985:chr6:85484190-85484020:1;1143/chr1:3539:chr1:37499734-37499586:2;1144/
chr1:3539:chr1:37499734-37499586:1;1145/chr22:2146:chr22:48885256-48885117:2;1146/chr22:2146:chr22:4
8885256-48885117:1;1147/chr18:77:chr18:4455520-4455345:2;1148/chr18:77:chr18:4455520-4455345:1;1149/
chr16:375:chr16:1203334-1203167:2;1150/chr16:375:chr16:1203334-1203167:1;1151/chr14:343:chr14:371165
76-37116434:2;1152/chr14:343:chr14:37116576-37116434:1;1153/chr1:4547:chr1:85514236-85514067:2;1154/
chr1:4547:chr1:85514236-85514067:1;1155/chr17:1003:chr17:11144402-11144227:2;1156/chr17:1003:chr17:1
1144402-11144227:1;1157/chr7:3136:chr7:100318355-100318219:2;1158/chr7:3136:chr7:100318355-1003182
19:1;1159/chr7:4153:chr7:150812030-150811874:2;1160/chr7:4153:chr7:150812030-150811874:1;1161/chr11:
2301:chr11:63768057-63767885:2;1162/chr11:2301:chr11:63768057-63767885:1;1163/chr2:4268:chr2:177016
631-177016505:2;1164/chr2:4268:chr2:177016631-177016505:1;1165/chr9:343:chr9:34809888-34809723:2;11
66/chr12:428:chr12:6664740-6664574:2;1167/chr12:428:chr12:6664740-6664574:1;1168/chr11:1094:chr11:769
5117-7694967:2;1169/chr11:1094:chr11:7695117-7694967:1;1170/chr9:343:chr9:34809888-34809723:1;1171/c
hr16:3215:chr16:77468687-77468523:2;1172/chr16:3215:chr16:77468687-77468523:1;1173/cg18456523:chr5:
54516951-54516804:1;1174/chr5:1679:chr5:68711451-68711276:2;1175/chr5:1679:chr5:68711451-68711276:1;
1176/chr1:5181:chr1:151811374-151811199:2;1177/chr1:5181:chr1:151811374-151811199:1;1178/chr16:2389:
chr16:51186569-51186438:2;1179/chr16:2389:chr16:51186569-51186438:1;1180/chr15:2091:chr15:91427593-
91427434:2;1181/chr15:2091:chr15:91427593-91427434:1;1182/chr4:1405:chr4:13545813-13545648:2;1183/c
hr2:5231:chr2:237072614-237072463:2;1184/chr2:5231:chr2:237072614-237072463:1;1185/chr4:1405:chr4:13
545813-13545648:1;1186/chr21:1182:chr21:46848176-46848010:2;1187/chr21:1182:chr21:46848176-4684801
0:1;1188/chr11:1511:chr11:31827114-31826942:2;1189/chr11:1511:chr11:31827114-31826942:1;1190/chr17:2
060:chr17:40822498-40822329:2;1191/chr17:2060:chr17:40822498-40822329:1;1192/chr22:2727:chr22:50737
784-50737647:1;1193/chr16:1299:chr16:12996019-12995848:2;1194/chr16:1299:chr16:12996019-12995848:1;
1195/chr18:1125:chr18:63418264-63418098:2;1196/chr18:1125:chr18:63418264-63418098:1;1197/chr5:2198:c
hr5:127874673-127874515:2;1198/chr5:2198:chr5:127874673-127874515:1;1199/chr1:253:chr1:1566309-1566
164:2;1200/chr1:253:chr1:1566309-1566164:1;1201/chr19:4939:chr19:58868430-58868255:2;1202/chr19:4939:
chr19:58868430-58868255:1;1203/chr2:5244:chr2:237081601-237081427:1;1204/chr19:368:chr19:1469580-14
69455:2;1205/chr19:368:chr19:1469580-1469455:1;1206/chr8:738:chr8:11560058-11559891:2;1207/chr8:738:c
hr8:11560058-11559891:1;1208/chr10:4942:chr10:135193158-135193014:2;1209/chr10:4942:chr10:135193158-
135193014:1;1210/chr1:359:chr1:2005635-2005485:1;1211/chr1:2371:chr1:16085571-16085408:2;1212/chr1:2
371:chr1:16085571-16085408:1;1213/chr2:2432:chr2:89065078-89064903:1;1214/cg14649650:chr10:1393402
9-13933861:2;1215/cg14649650:chr10:13934029-13933861:1;1216/chr1:222:chr1:1475176-1475024:2;1217/ch
r1:222:chr1:1475176-1475024:1;1218/chr20:924:chr20:32254757-32254591:2;1219/chr7:3502:chr7:127672794-
127672628:2;1220/chr7:3502:chr7:127672794-127672628:1;1221/chr2:5420:chr2:239756031-239755883:2;12
22/chr2:5420:chr2:239756031-239755883:1;1223/chr22:1367:chr22:42679893-42679731:2;1224/chr22:1367:ch
r22:42679893-42679731:1;1225/chr20:924:chr20:32254757-32254591:1;1226/chr5:91:chr5:528913-528766:2;1
227/chr5:91:chr5:528913-528766:1;1228/chr13:1053:chr13:100548459-100548313:2;1229/chr13:1053:chr13:10
0548459-100548313:1;1230/chr7:4818:chr7:157478660-157478508:2;1231/chr7:4818:chr7:157478660-157478
508:1;1232/chr14:931:chr14:72399532-72399383:2;1233/chr2:2852:chr2:107503201-107503061:2;1234/chr2:2
852:chr2:107503201-107503061:1;1235/chr14:931:chr14:72399532-72399383:1;1236/chr7:1486:chr7:2714188
9-27141719:2;1237/chr7:1486:chr7:27141889-27141719:1;1238/chr2:1263:chr2:26407815-26407679:2;1239/ch
r2:1263:chr2:26407815-26407679:1;1240/chr10:983:chr10:28034760-28034588:2;1241/chr10:983:chr10:28034
760-28034588:1;1242/chr20:924:chr20:32255023-32254875:2;1243/chr20:924:chr20:32255023-32254875:1;12
44/chr1:4371:chr1:63789664-63789496:2;1245/chr1:4371:chr1:63789664-63789496:1;1246/chr21:324:chr21:38
077303-38077138:2;1247/chr21:324:chr21:38077303-38077138:1;1248/chr1:3370:chr1:32827642-32827468:2;
1249/chr1:3370:chr1:32827642-32827468:1;1250/chr8:2241:chr8:99960969-99960794:2;1251/chr8:2241:chr8:9
9960969-99960794:1;1252/chr1:4177:chr1:54203574-54203399:2;1253/chr1:4177:chr1:54203574-54203399:1;
1254/chr8:1959:chr8:70947045-70946889:2;1255/chr8:1959:chr8:70947045-70946889:1;1256/chr1:2205:chr1:1
2123709-12123550:2;1257/chr1:2205:chr1:12123709-12123550:1;1258/chr15:1553:chr15:76635433-76635267:
2;1259/chr15:1553:chr15:76635433-76635267:1;1260/chr1:831:chr1:2987148-2987022:2;1261/chr1:831:chr1:2
987148-2987022:1;1262/chr20:136:chr20:2674616-2674449:2;1263/chr20:136:chr20:2674616-2674449:1;1264/
chr13:1782:chr13:114523993-114523818:2;1265/chr13:1782:chr13:114523993-114523818:1;1266/chr9:343:chr
9:34810106-34809981:2;1267/chr9:343:chr9:34810106-34809981:1;1268/chr8:1006:chr8:22409029-22408887:
2;1269/chr8:1006:chr8:22409029-22408887:1;1270/chr9:3136:chr9:138606582-138606424:2;1271/chr9:3136:c
hr9:138606582-138606424:1;1272/chr20:2210:chr20:59827027-59826882:2;1273/chr20:2210:chr20:59827027-
59826882:1;1274/chr4:15:chr4:330482-330342:2;1275/chr4:1403:chr4:13544202-13544031:2;1276/chr19:562:c
hr19:2282730-2282564:1;1277/chr4:15:chr4:330482-330342:1;1278/chr4:1403:chr4:13544202-13544031:1;127
9/chr18:1611:chr18:76740192-76740051:2;1280/chr18:1611:chr18:76740192-76740051:1;1281/chr7:727:chr7:2
539980-2539830:1;1282/chr11:141:chr11:849963-849796:2;1283/chr11:141:chr11:849963-849796:1;1284/cg16
791424:chr14:27068157-27067985:1;1285/chr1:3150:chr1:27687341-27687204:2;1286/chr1:3150:chr1:276873
41-27687204:1;1287/chr4:1270:chr4:8862937-8862789:2;1288/chr4:1270:chr4:8862937-8862789:1;1289/chr10:
3516:chr10:125751261-125751128:2;1290/chr10:3516:chr10:125751261-125751128:1;1291/chr15:219:chr15:2
7216334-27216209:2;1292/chr15:219:chr15:27216334-27216209:1;1293/chr17:3421:chr17:73074038-7307386
4:1;1294/chr6:93:chr6:1314245-1314076:2;1295/chr6:93:chr6:1314245-1314076:1;1296/chr11:2506:chr11:6540
8451-65408278:2;1297/chr11:2506:chr11:65408451-65408278:1;1298/chr2:1220:chr2:25439097-25438923:2;1
299/chr2:1220:chr2:25439097-25438923:1;1300/chr10:4269:chr10:133109705-133109558:2;1301/chr10:4269:c
hr10:133109705-133109558:1;1302/chr15:2019:chr15:89955002-89954827:2;1303/chr15:2019:chr15:89955002-
89954827:1;1304/chr1:4364:chr1:63786122-63785973:1;1305/chr10:1133:chr10:35929284-35929117:2;1306/c
hr10:1133:chr10:35929284-35929117:1;1307/chr4:2647:chr4:164265081-164264908:2;1308/chr4:2647:chr4:16
4265081-164264908:1;1309/chr1:4827:chr1:110613115-110612942:2;1310/chr1:4827:chr1:110613115-110612
942:1;1311/chr9:1374:chr9:112081565-112081412:2;1312/chr9:1374:chr9:112081565-112081412:1;1313/chr5:
3116:chr5:170735801-170735626:2;1314/chr6:3116:chr5:170735801-170735626:1;1315/chr14:411:chr14:3872
4877-38724714:2;1316/chr14:411:chr14:38724877-38724714:1;1317/chr12:1452:chr12:58021724-58021565:2;
1318/chr12:1452:chr12:58021724-58021565:1;1319/chr2:257:chr2:1747069-1746939:2;1320/chr2:257:chr2:174
7069-1746939:1;1321/chr13:401:chr13:29394356-29394206:2;1322/chr13:401:chr13:29394356-29394206:1;13
23/chr22:1288:chr22:40391389-40391226:2;1324/chr22:1288:chr22:40391389-40391226:1;1325/chr15:983:chr
15:60297160-60296999:2;1326/chr15:983:chr15:60297160-60296999:1;1327/chr18:1054:chr18:57364519-5736
4384:2;1328/chr18:1054:chr18:57364519-57364384:1;1329/chr19:4862:chr19:58038676-58038509:2;1330/chr1
9:4862:chr19:58038676-58038509:1;1331/chr13:1108:chr13:102569198-102569062:2;1332/chr13:1108:chr13:1
02569198-102569062:1;1333/chr12:3052:chr12:130389080-130388955:2;1334/chr12:3052:chr12:130389080-1
30388955:1;1335/chr5:1718:chr5:72677453-72677280:2;1336/chr5:1718:chr5:72677453-72677280:1;1337/chr5:
829:chr5:3595934-3595761:2;1338/chr5:829:chr5:3595934-3595761:1;1339/cg21039708:chr14:57278810-572
78636:1;1340/chr4:1702:chr4:42153735-42153562:2;1341/chr4:1702:chr4:42153735-42153562:1;1342/chr5:22
1:chr5:1059274-1059119:2;1343/chr5:221:chr5:1059274-1059119:1;1344/chr2:3075:chr2:114035222-11403504
7:1;1345/chr19:267:chr19:1169102-1168933:2;1346/chr19:267:chr19:1169102-1168933:1;1347/chr10:2700:chr
10:102587682-102587520:2;1348/cg08167706:chr7:134144258-134144100:1;1349/chr10:3652:chr10:1268409
67-126840797:2;1350/chr20:925:chr20:32255745-32255575:2;1351/chr20:925:chr20:32255745-32255575:1;13
52/chr19:3840:chr19:46518724-46518577:2;1353/chr19:3840:chr19:46518724-46518577:1;1354/chr2:1519:chr
2:39187360-39187185:2;1355/chr2:1519:chr2:39187360-39187185:1;1356/chr18:75:chr18:4454785-4454611:2;
1357/chr18:75:chr18:4454785-4454611:1;1358/chr12:1542:chr12:66123260-66123121:2;1359/chr12:1542:chr1
2:66123260-66123121:1;1360/chr9:629:chr9:79635570-79635395:2;1361/chr9:629:chr9:79635570-79635395:1;
1362/chr2:2063:chr2:71116441-71116267:2;1363/chr2:2063:chr2:71116441-71116267:1;1364/chr12:2984:chr1
2:129338639-129338472:2;1365/chr12:2984:chr12:129338639-129338472:1;1366/chr14:363:chr14:37136284-3
7136114:2;1367/chr14:363:chr14:37136284-37136114:1;1368/chr13:519:chr13:37006155-37005994:2;1369/chr
13:519:chr13:37006155-37005994:1;1370/chr22:2774:chr22:51042732-51042561:2;1371/chr22:2774:chr22:510
42732-51042561:1;1372/chr15:275:chr15:29131090-29130948:2;1373/chr15:275:chr15:29131090-29130948:1;
1374/chr12:1090:chr12:50355297-50355159:2;1375/chr12:1090:chr12:50355297-50355159:1;1376/chr6:2190:c
hr6:105389224-105389096:2;1377/chr6:2190:chr6:105389224-105389096:1;1378/chr7:4153:chr7:150812343-1
50812215:2;1379/chr7:4153:chr7:150812343-150812215:1;1380/chr20:525:chr20:21377259-21377094:2;1381/
chr20:525:chr20:21377259-21377094:1;1382/chr10:2700:chr10:102587682-102587520:1;1383/chr10:3652:chr1
0:126840967-126840797:1;1384/chr2:2233:chr2:74875337-74875170:2;1385/chr2:2233:chr2:74875337-748751
70:1;1386/chr1:3371:chr1:32828021-32827850:2;1387/chr1:3371:chr1:32828021-32827850:1;1388/chr16:241:c
hr16:1040802-1040629:1;1389/chr3:2897:chr3:157821435-157821261:2;1390/chr3:2897:chr3:157821435-1578
21261:1;1391/chr5:2522:chr5:140306278-140306136:2;1392/chr5:2522:chr5:140306278-140306136:1;1393/chr
22:2146:chr22:48885627-48885471:2;1394/chr22:2146:chr22:48885627-48885471:1;1395/chr2:4268:chr2:1770
16786-177016616:2;1396/chr17:1522:chr17:27038943-27038773:2;1397/chr17:1522:chr17:27038943-2703877
3:1;1398/chr9:1427:chr9:116226070-116225907:2;1399/chr9:1427:chr9:116226070-116225907:1;1400/chr3:13
8:chr3:8810227-8810102:2;1401/chr3:138:chr3:8810227-8810102:1;1402/chr2:4268:chr2:177016786-17701661
6:1;1403/chr8:1788:chr8:57358189-57358050:1;1404/chr12:3095:chr12:130647184-130647019:2;1405/chr12:3
095:chr12:130647184-130647019:1;1406/chr7:4786:chr7:157406328-157406165:2;1407/chr7:4786:chr7:15740
6328-157406165:1;1408/chr19:4874:chr19:58239078-58238903:1;1409/chr9:4:chr9:113639-113513:2;1410/chr
9:4:chr9:113639-113513:1;1411/chr1:7210:chr1:237206324-237206168:2;1412/chr1:7210:chr1:237206324-237
206168:1;1413/chr19:3923:chr19:47910442-47910317:2;1414/chr12:1112:chr12:51717830-51717655:2;1415/c
hr19:3278:chr19:38886821-38886696:2;1416/chr19:3278:chr19:38886821-38886696:1;1417/chr19:3923:chr19:
47910504-47910369:2;1418/chr19:3923:chr19:47910504-47910369:1;1419/chr19:2540:chr19:30017174-30017
010:2;1420/chr19:2540:chr19:30017174-30017010:1;1421/chr17:4170:chr17:77916930-77916765:2;1422/chr17:
4170:chr17:77916930-77916765:1;1423/chr7:4539:chr7:155580021-155579858:2;1424/chr7:4539:chr7:155580
021-155579858:1;1425/chr7:873:chr7:3341305-3341174:2;1426/chr7:873:chr7:3341305-3341174:1;1427/chr4:1
23:chr4:997253-997081:2;1428/chr4:123:chr4:997253-997081:1;1429/chr1:5180:chr1:151810731-151810557:2;
1430/chr1:5180:chr1:151810731-151810557:1;1431/chr10:2874:chr10:105344571-105344411:2;1432/chr10:28
74:chr10:105344571-105344411:1;1433/chr7:2589:chr7:70597385-70597237:2;1434/chr7:2589:chr7:70597385-
70597237:1;1435/chr6:144:chr6:1620548-1620376:2;1436/chr6:144:chr6:1620548-1620376:1;1437/chr12:1523:
chr12:65218668-65218543:2;1438/chr12:1523:chr12:65218668-65218543:1;1439/chr22:1858:chr22:46481122-
46480950:2;1440/chr22:1858:chr22:46481122-46480950:1;1441/chr14:1137:chr14:77492702-77492527:2;1442/
chr14:1137:chr14:77492702-77492527:1;1443/chr15:207:chr15:27112981-27112832:2;1444/chr10:801:chr10:1
7496201-17496073:2;1445/chr10:801:chr10:17496201-17496073:1;1446/chr10:2140:chr10:81003231-8100308
7:2;1447/chr10:2140:chr10:81003231-81003087:1;1448/chr22:369:chr22:22863167-22862997:2;1449/chr22:36
9:chr22:22863167-22862997:1;1450/chr5:3695:chr5:178421685-178421544:2;1451/chr5:3695:chr5:178421685-
178421544:1;1452/chr1:1196:chr1:3464917-3464745:2;1453/chr1:1196:chr1:3464917-3464745:1;1454/chr19:5
66:chr19:2290579-2290446:2;1455/chr19:566:chr19:2290579-2290446:1;1456/chr15:264:chr15:28352965-2835
2820:2;1457/chr11:3710:chr11:100998989-100998854:2;1458/chr11:3710:chr11:100998989-100998854:1;1459/
chr8:354:chr8:1950282-1950148:2;1460/chr8:354:chr8:1950282-1950148:1;1461/chr10:467:chr10:7450319-74
50156:2;1462/chr10:467:chr10:7450319-7450156:1;1463/chr13:356:chr13:28550209-28550072:2;1464/chr13:3
56:chr13:28550209-28550072:1;1465/chr22:2791:chr22:51135947-51135790:2;1466/chr22:2791:chr22:511359
47-51135790:1;1467/chr2:1921:chr2:63283036-63282867:2;1468/chr2:1921:chr2:63283036-63282867:1;1469/c
hr19:2488:chr19:29284706-29284548:2;1470/chr19:2488:chr19:29284706-29284548:1;1471/chr15:207:chr15:2
7112981-27112832:1;1472/chr22:1921:chr22:46932592-46932420:2;1473/chr22:1921:chr22:46932592-469324
20:1;1474/chr12:2942:chr12:128752178-128752024:2;1475/chr7:4818:chr7:157478747-157478586:2;1476/chr7:
4818:chr7:157478747-157478586:1;1477/chr12:2942:chr12:128752178-128752024:1;1478/chr17:279:chr17:19
62444-1962288:2;1479/chr17:279:chr17:1962444-1962288:1;1480/cg17332326:chr19:37997586-37997412:1;1
481/chr3:1095:chr3:47050951-47050803:2;1482/chr1:3916:chr1:46951560-46951399:2;1483/chr15:1558:chr15:
76639518-76639393:2;1484/chr8:40:chr8:688182-688010:2;1485/chr8:40:chr8:688182-688010:1;1486/chr14:36
9:chr14:37667357-37667229:2;1487/chr14:369:chr14:37667357-37667229:1;1488/chr17:534:chr17:4802644-48
02489:2;1489/chr17:534:chr17:4802644-4802489:1;1490/chr1:250:chr1:1565027-1564889:2;1491/chr1:250:chr
1:1565027-1564889:1;1492/chr7:2696:chr7:72848212-72848057:2;1493/chr7:2696:chr7:72848212-72848057:1;
1494/chr4:207:chr4:1400795-1400625:2;1495/chr18:105:chr18:5890801-5890652:2;1496/chr18:105:chr18:5890
801-5890652:1;1497/chr15:2011:chr15:89950895-89950720:2;1498/chr13:877:chr13:79183624-79183462:2;14
99/chr13:877:chr13:79183624-79183462:1;1500/chr11:4458:chr11:125036677-125036542:2;1501/chr11:4458:c
hr11:125036677-125036542:1;1502/chr22:1852:chr22:46475957-46475784:2;1503/chr19:367:chr19:1468394-1
468234:2;1504/chr19:367:chr19:1468394-1468234:1;1505/chr2:1346:chr2:27530799-27530635:2;1506/chr2:13
46:chr2:27530799-27530635:1;1507/chr9:3509:chr9:139741503-139741332:2;1508/chr9:3509:chr9:139741503-
139741332:1;1509/chr22:2703:chr22:50623575-50623404:2;1510/chr22:2703:chr22:50623575-50623404:1;151
1/chr4:2032:chr4:81124127-81123963:2;1512/chr4:2032:chr4:81124127-81123963:1;1513/chr19:4708:chr19:55
997910-55997742:2;1514/chr6:256:chr6:5086536-5086395:2;1515/chr6:256:chr6:5086536-5086395:1;1516/chr
4:1481:chr4:20256633-20256503:2;1517/chr4:1481:chr4:20256633-20256503:1;1518/chr4:773:chr4:5894233-5
894060:2;1519/chr4:773:chr4:5894233-5894060:1;1520/cg17872757:chr11:128564260-128564128:2;1521/chr1:
7209:chr1:237206009-237205864:2;1522/chr1:7209:chr1:237206009-237205864:1;1523/chr12:307:chr12:4918
937-4918794:2;1524/chr12:307:chr12:4918937-4918794:1;1525/chr1:3709:chr1:41327704-41327547:2;1526/ch
r1:3709:chr1:41327704-41327547:1;1527/chr17:2375:chr17:46711323-46711149:2;1528/chr2:3997:chr2:16228
0699-162280561:2;1529/chr2:3997:chr2:162280699-162280561:1;1530/chr22:2526:chr22:49969753-49969615:
2;1531/chr22:2526:chr22:4996975349969615:1;1532/chr1:1196:chr1:3464847-3464695:1;1533/chr10:524:chr1
0:8098176-8098032:2;1534/chr10:524:chr10:8098176-8098032:1;1535/chr8:1742:chr8:55379931-55379778:2;1
536/chr8:1742:chr8:55379931-55379778:1;1537/chr6:2198:chr5:127874548-127874405:2;1538/chr5:2198:chr5:
127874548-127874405:1;1539/chr20:2210:chr20:59828073-59827941:2;1540/chr20:2210:chr20:59828073-598
27941:1;1541/chr9:135:chr9:8857697-8857539:2;1542/chr9:135:chr9:8857697-8857539:1;1543/chr10:2911:chr
10:106401341-106401173:2;1544/chr10:2911:chr10:106401341-106401173:1;1545/chr14:341:chr14:37053269-
37053129:1;1546/chr4:1277:chr4:8873708-8873557:2;1547/chr4:1277:chr4:8873708-8873557:1;1548/cg06072
021:chr11:128564147-128563972:2;1549/cg06072021:chr11:128564147-128563972:1;1550/chr13:1184:chr13:
109793537-109793408:2;1551/chr13:1184:chr13:109793537-109793408:1;1552/chr3:1502:chr3:58572844-585
72702:1;1553/chr8:3701:chr8:145104374-145104222:2;1554/chr1:359:chr1:2005416-2005254:2;1555/chr1:359:
chr1:2005416-2005254:1;1556/chr11:4686:chr11:130067833-130067661:2;1557/chr11:4686:chr11:130067833-
130067661:1;1558/chr3:138:chr3:8809999-8809856:2;1559/chr3:138:chr3:8809999-8809856:1;1560/chr1:5181:
chr1:151811440-151811314:2;1561/chr1:5181:chr1:151811440-151811314:1;1562/chr22:294:chr22:20779652-
20779494:2;1563/chr22:294:chr22:20779652-20779494:1;1564/chr14:1137:chr14:77492434-77492309:2;1565/
chr14:1137:chr14:77492434-77492309:1;1566/chr19:367:chr19:1467540-1467377:2;1567/chr19:367:chr19:146
7540-1467377:1;1568/chr8:1878:chr8:65282739-65282588:2;1569/chr8:1878:chr8:65282739-65282588:1;1570/
chr18:280:chr18:11751686-11751551:2;1571/chr18:280:chr18:11751686-11751551:1;1572/chr22:2676:chr22:5
0496975-50496837:2;1573/chr22:2676:chr22:50496975-50496837:1;1574/chr19:211:chr19:1042311-1042139:2;
1575/chr19:211:chr19:1042311-1042139:1;1576/chr18:1613:chr18:76740750-76740605:2;1577/chr18:1613:chr
18:76740750-76740605:1;1578/chr14:323:chr14:36987207-36987032:2;1579/chr16:1569:chr16:22825918-2282
5749:2;1580/chr16:1569:chr16:22825918-22825749:1;1581/chr14:323:chr14:36987207-36987032:1;1582/chr1:
1594:chr1:6126343-6126173:2;1583/chr8:3759:chr8:145698738-145698597:2;1584/chr8:3759:chr8:145698738-
145698597:1;1585/chr3:2134:chr3:123167247-123167100:2;1586/chr11:98:chr11:627188-627038:2;1587/chr14:
2038:chr14:101923887-101923723:2;1588/chr3:2134:chr3:123167247-123167100:1;1589/chr11:98:chr11:6271
88-627038:1;1590/chr14:2038:chr14:101923887-101923723:1;1591/chr12:1463:chr12:58131815-58131671:2;1
592/chr12:1463:chr12:58131815-58131671:1;1593/chr12:1125:chr12:52215491-52215337:2;1594/chr12:1125:c
hr12:52215491-52215337:1;1595/chr10:2138:chr10:81002332-81002207:1;1596/chr8:39:chr8:687729-687560:
2;1597/chr8:39:chr8:687729-687560:1;1598/chr1:1594:chr1:6126343-6126173:1;1599/chr1:4827:chr1:1106132
20-110613071:2;1600/chr1:4827:chr1:110613220-110613071:1;1601/chr8:2236:chr8:99952394-99952226:2;16
02/chr8:2236:chr8:99952394-99952226:1;1603/chr8:941:chr8:21647736-21647578:2;1604/chr8:941:chr8:21647
736-21647578:1;1605/chr16:1569:chr16:22825629-22825465:2;1606/chr16:1569:chr16:22825629-22825465:1;
1607/chr1:1254:chr1:3567687-3567562:2;1608/chr1:1254:chr1:3567687-3567562:1;1609/chr19:1690:chr19:132
07491-13207357:2;1610/chr19:1690:chr19:13207491-13207357:1;1611/chr12:1858:chr12:104610140-1046100
05:2;1612/chr12:1858:chr12:104610140-104610005:1;1613/chr3:2641:chr3:138679606-138679477:2;1614/chr3:
2641:chr3:138679606-138679477:1;1615/chr22:2774:chr22:51043024-51042853:2;1616/chr22:2774:chr22:510
43024-51042853:1;1617/chr10:2140:chr10:81003133-81002965:2;1618/chr10:2140:chr10:81003133-81002965:
1;1619/chr12:1090:chr12:50355556-50355398:2;1620/chr12:1090:chr12:50355556-50355398:1;1621/chr1:3150:
chr1:27687217-27687073:2;1622/chr1:3150:chr1:27687217-27687073:1;1623/chr3:5:chr3:238958-238785:2;16
24/chr3:5:chr3:238958-238785:1;1625/chr22:163:chr22:19711965-19711838:2;1626/chr22:163:chr22:19711965-
19711838:1;1627/chr9:1705:chr9:126775225-126775052:2;1628/chr9:1705:chr9:126775225-126775052:1;162
9/chr12:1860:chr12:104697497-104697323:2;1630/chr12:1860:chr12:104697497-104697323:1;1631/chr2:3996:
chr2:162280049-162279883:2;1632/chr2:3996:chr2:162280049-162279883:1;1633/chr12:157:chr12:2800894-2
800749:2;1634/chr12:157:chr12:2800894-2800749:1;1635/chr8:3701:chr8:145104374-145104222:1;1636/chr19:
368:chr19:1469284-1469111:2;1637/chr19:368:chr19:1469284-1469111:1;1638/chr9:3297:chr9:139094963-13
9094789:2;1639/chr9:3297:chr9:139094963-139094789:1;1640/chr20:55:chr20:826065-825900:2;1641/chr20:5
5:chr20:826065-825900:1;1642/chr8:2284:chr8:102506385-102506236:2;1643/chr8:2284:chr8:102506385-1025
06236:1;1644/chr10:2911:chr10:106401064-106400899:2;1645/chr10:2911:chr10:106401064-106400899:1;164
6/chr14:2727:chr14:105714945-105714771:2;1647/chr14:2727:chr14:105714945-105714771:1;1648/chr15:250
1:chr15:101513727-101513562:2;1649/chr15:2501:chr15:101513727-101513562:1;1650/chr19:367:chr19:1467
811-1467685:2;1651/chr19:367:chr19:1467811-1467685:1;1652/chr16:4179:chr16:88601120-88600956:2;1653/
chr16:4179:chr16:88601120-88600956:1;1654/chr1:1594:chr1:6126259-6126084:2;1655/chr1:1594:chr1:61262
59-6126084:1;1656/chr6:1788:chr6:54711496-54711328:2;1657/chr8:650:chr8:10587987-10587836:2;1658/chr
8:650:chr8:10587987-10587836:1;1659/chr18:776:chr18:44774027-44773887:2;1660/chr18:776:chr18:4477402
7-44773887:1;1661/chr6:1788:chr6:54711496-54711328:1;1662/chr19:1180:chr19:6745018-6744847:1;1663/ch
r1:4908:chr1:113051739-113051598:2;1664/chr1:4908:chr1:113051739-113051598:1;1665/chr5:1789:chr5:763
73664-76373502:2;1666/chr5:1789:chr5:76373664-76373502:1;1667/chr4:2602:chr4:155411852-155411694:2;
1668/chr4:2602:chr4:155411852-155411694:1;1669/chr4:24:chr4:569110-568938:2;1670/chr4:24:chr4:569110-
568938:1;1671/chr5:3347:chr5:175224022-175223871:2;1672/chr5:3347:chr5:175224022-175223871:1;1673/c
hr7:3502:chr7:127672698-127672546:2;1674/chr7:3502:chr7:127672698-127672546:1;1675/chr2:5038:chr2:23
3285412-233285282:2;1676/chr2:5038:chr2:233285412-233285282:1;1677/chr1:59:chr1:969126-968986:2;167
8/chr1:59:chr1:969126-968986:1;1679/chr12:1112:chr12:51718149-51718011:2;1680/chr16:224:chr16:1024644-
1024472:1;1681/chrX:784:chrX:47433584-47433422:2;1682/chr4:109:chr4:967754-967593:2;1683/chr4:109:ch
r4:967754-967593:1;1684/cg06993118:chr5:127874080-127873917:2;1685/chr11:2667:chr11:67291071-67290
897:1;1686/cg06993118:chr5:127874080-127873917:1;1687/chr1:4054:chr1:50889152-50888992:2;1688/chr1:
4054:chr1:50889152-50888992:1;1689/chrX:784:chrX:47433584-47433422:1;1690/chr11:550:chr11:1995499-1
995325:2;1691/chr11:550:chr11:1995499-1995325:1;1692/chr10:2670:chr10:102483906-102483732:1;1693/chr
5:3858:chr5:179243985-179243848:2;1694/chr5:3858:chr5:179243985-179243848:1;1695/chr12:1112:chr12:51
718149-51718011:1;1696/chr19:3157:chr19:37096458-37096329:2;1697/chr19:3157:chr19:37096458-3709632
9:1;1698/chr15:1556:chr15:76638706-76638531:2;1699/chr15:1556:chr15:76638706-76638531:1;1700/chr1:48
27:chr1:110613043-110612888:2;1701/chr1:4827:chr1:110613043-110612888:1;1702/chr19:3923:chr19:47910
442-47910317:1;1703/chr12:1112:chr12:51717830-51717655:1;1704/chr1:4913:chr1:113287046-113286876:2;
1705/chr1:4913:chr1:113287046-113286876:1;1706/chr4:1664:chr4:40859069-40858900:2;1707/chr4:1664:chr
4:40859069-40858900:1;1708/chr10:4357:chr10:133796207-133796055:2;1709/chr10:4357:chr10:133796207-1
33796055:1;1710/chr13:1700:chr13:113764226-113764055:2;1711/chr13:1700:chr13:113764226-113764055:1;
1712/chr1:7210:chr1:237206577-237206452:2;1713/chr1:7210:chr1:237206577-237206452:1;1714/chr14:454:c
hr14:48144169-48144013:2;1715/chr14:454:chr14:48144169-48144013:1;1716/chr8:1720:chr8:54791995-5479
1849:2;1717/chr8:1720:chr8:54791995-54791849:1;1718/chr10:4591:chr10:134602170-134602045:2;1719/chr1
2:2984:chr12:129338495-129338347:2;1720/chr12:2984:chr12:129338495-129338347:1;1721/chr15:264:chr15:
28352965-28352820:1;1722/chr19:4708:chr19:55997858-55997686:2;1723/chr19:4708:chr19:55997858-55997
686:1;1724/chr10:4591:chr10:134602170-134602045:1;1725/chr1:59:chr1:969637-969505:2;1726/chr1:59:chr1:
969637-969505:1;1727/chr3:1095:chr3:47050951-47050803:1;1728/chr17:4139:chr17:77789075-77788900:2;1
729/chr17:4139:chr17:77789075-77788900:1;1730/chr10:4583:chr10:134599436-134599278:2;1731/chr10:458
3:chr10:134599436-134599278:1;1732/chr1:3916:chr1:46951560-46951399:1;1733/chr15:1558:chr15:7663951
8-76639393:1;1734/chr4:207:chr4:1400795-1400625:1;1735/chr15:1832:chr15:83953429-83953303:2;1736/chr
15:1832:chr15:83953429-83953303:1;1737/chr15:2011:chr15:89950895-89950720:1;1738/chr7:2696:chr7:7284
8359-72848210:2;1739/chr7:2696:chr7:72848359-72848210:1;1740/chr19:2540:chr19:30017532-30017403:2;1
741/chr19:2540:chr19:30017532-30017403:1;1742/chr22:1852:chr22:46475957-46475784:1;1743/chr20:2210:c
hr20:59827778-59827622:2;1744/chr20:2210:chr20:59827778-59827622:1;1745/chr11:4678:chr11:130029753-
130029582:2;1746/chr11:4678:chr11:130029753-130029582:1;1747/chr19:4708:chr19:55997910-55997742:1;1
748/chr11:141:chr11:849717-849574:2;1749/chr11:141:chr11:849717-849574:1;1750/chr9:1770:chr9:12726597
1-127265845:2;1751/chr9:1770:chr9:127265971-127265845:1;1752/chr17:1003:chr17:11143920-11143748:2;1
753/chr17:1003:chr17:11143920-11143748:1;1754/chr7:2651:chr7:71801243-71801070:2;1755/chr7:2651:chr7:
71801243-71801070:1;1756/chr13:1461:chr13:112723112-112722941:2;1757/chr13:1461:chr13:112723112-11
2722941:1;1758/cg17872757:chr11:128564260-128564128:1;1759/chr20:525:chr20:21377495-21377361:2;176
0/chr20:525:chr20:21377495-21377361:1;1761/chr21:158:chr21:32931842-32931715:2;1762/chr21:158:chr21:3
2931842-32931715:1;1763/chr17:1558:chr17:28088686-28088561:2;1764/chr17:1558:chr17:28088686-280885
61:1;1765/chr17:2375:chr17:46711323-46711149:1;1766/chr20:1728:chr20:50721804-50721640:2;1767/chr20:
1728:chr20:50721804-50721640:1;1768/chr10:848:chr10:21799485-21799313:2;1769/chr10:848:chr10:217994
85-21799313:1;1770/chr8:1309:chr8:35092911-35092759:2;1771/chr8:1309:chr8:35092911-35092759:1;1772/c
hr14:1433:chr14:93153804-93153675:2;1773/chr14:1433:chr14:93153804-93153675:1;1774/chr1:3209:chr1:29
448016-29447851:2;1775/chr1:3209:chr1:29448016-29447851:1;1776/chr10:2308:chr10:88123173-88123004:2;
1777/chr10:2308:chr10:88123173-88123004:1;1778/chr12:428:chr12:6665547-6665382:2;1779/chr12:428:chr1
2:6665547-6665382:1;1780/chr19:759:chr19:3435327-3435160:2;1781/chr19:759:chr19:3435327-3435160:1;17
82/chr9:1226:chr9:100617021-100616896:2;1783/chr9:1226:chr9:100617021-100616896:1;1784/chr5:1812:chr
5:77147725-77147574:2;1785/chr5:1812:chr5:77147725-77147574:1;1786/chr11:461:chr11:1864283-1864143:
1;1787/chr7:3616:chr7:130419074-130418920:2;1788/chr1:5370:chr1:156046785-156046621:2;1789/chr1:5370:
chr1:156046785-156046621:1;1790/chr7:3586:chr7:129421859-129421689:2;1791/chr7:3586:chr7:129421859-
129421689:1;1792/chr1:3956:chr1:47904618-47904456:2;1793/chr1:3956:chr1:47904618-47904456:1;1794/chr
19:325:chr19:1302648-1302474:2;1795/chr19:325:chr19:1302648-1302474:1;1796/chr9:239:chr9:23822085-23
821911:2;1797/chr9:239:chr9:23822085-23821911:1;1798/chr17:4170:chr17:77916835-77916670:2;1799/chr4:
1487:chr4:21950414-21950243:2;1800/chr4:1487:chr4:21950414-21950243:1;1801/chr20:2056:chr20:5776652
7-57766364:1;1802/chr15:2063:chr15:90543355-90543230:2;1803/chr16:3215:chr16:77468803-77468637:2;18
04/chr16:3215:chr16:77468803-77468637:1;1805/chr7:811:chr7:2968628-2968453:2;1806/chr7:811:chr7:29686
28-2968453:1;1807/chr19:566:chr19:2290324-2290176:2;1808/chr19:566:chr19:2290324-2290176:1;1809/chr1
9:1807:chr19:14583177-14583049:2;1810/chr19:1807:chr19:14583177-14583049:1;1811/chr1:2257:chr1:13840
120-13839952:2;1812/chr1:2257:chr1:13840120-13839952:1;1813/chr7:1486:chr7:27141825-27141678:2;1814/
chr7:1486:chr7:27141825-27141678:1;1815/chr10:4051:chr10:131757340-131757165:2;1816/chr10:4051:chr10:
131757340-131757165:1;1817/chr17:4170:chr17:77916835-77916670:1;1818/chr6:2558:chr6:137810073-1378
09914:2;1819/chr6:2558:chr6:137810073-137809914:1;1820/chr15:2063:chr15:90543355-90543230:1;1821/chr
9:3136:chr9:138606326-138606158:2;1822/chr9:3136:chr9:138606326-138606158:1;1823/chr2:1181:chr2:2423
3090-24232939:2;1824/chr2:1181:chr2:24233090-24232939:1;1825/chr6:2142:chr6:100061973-100061801:2;1
826/chr6:2142:chr6:100061973-100061801:1;1827/chr4:2084:chr4:85419112-85418937:2;1828/chr4:2084:chr4:
85419112-85418937:1;1829/chr6:1567:chr6:42072744-42072604:1;1830/chr17:1003:chr17:11144720-1114454
5:2;1831/chr17:1003:chr17:11144720-11144545:1;1832/chr12:1613:chr12:72666345-72666215:2;1833/chr12:1
613:chr12:72666345-72666215:1;1834/chr8:1962:chr8:70981968-70981825:1;1835/chr19:1690:chr19:1320755
9-13207385:2;1836/chr5:2942:chr5:159399522-159399381:2;1837/chr1:5180:chr1:151810939-151810798:2;18
38/chr2:3718:chr2:131797753-131797611:2;1839/chr5:1719:chr5:72678461-72678298:2;1840/chr5:1719:chr5:7
2678461-72678298:1;1841/chr22:2764:chr22:50987389-50987218:2;1842/chr22:2764:chr22:50987389-509872
18:1;1843/chr2:4182:chr2:175199882-175199708:2;1844/chr2:4182:chr2:175199882-175199708:1;1845/chr7:3
489:chr7:126988120-126987957:2;1846/chr7:3489:chr7:126988120-126987957:1;1847/chr7:2162:chr7:503439
16-50343764:2;1848/chr8:1742:chr8:55379682-55379513:2;1849/chr8:1742:chr8:55379682-55379513:1;1850/c
hr20:1816:chr20:55205853-55205711:2;1851/chr20:1816:chr20:55205853-55205711:1;1852/chr19:3503:chr19:
41119748-41119577:1;1853/chr18:1155:chr18:70534824-70534686:2;1854/chr18:1155:chr18:70534824-70534
686:1;1855/chr16:1606:chr16:23847789-23847616:2;1856/chr16:1606:chr16:23847789-23847616:1;1857/chr7:
2162:chr7:50343916-50343764:1;1858/chr2:5862:chr2:242498352-242498227:2;1859/chr2:5862:chr2:2424983
52-242498227:1;1860/chr11:2512:chr11:65553881-65553714:2;1861/chr11:2512:chr11:65553881-65553714:1;
1862/chr14:125:chr14:24045711-24045561:2;1863/chr14:125:chr14:24045711-24045561:1;1864/chr2:4252:chr
2:176987999-176987831:2;1865/chr2:4252:chr2:176987999-176987831:1;1866/chr19:1690:chr19:13207559-13
207385:1;1867/chr4:5:chr4:107479-107323:2;1868/chr4:5:chr4:107479-107323:1;1869/chr19:368:chr19:146951
2-1469347:2;1870/chr19:368:chr19:1469512-1469347:1;1871/chr5:2942:chr5:159399522-159399381:1;1872/ch
r1:5180:chr1:151810939-151810798:1;1873/chr2:3718:chr2:131797753-131797611:1;1874/chr22:720:chr22:30
662103-30661932:2;1875/chr22:720:chr22:30662103-30661932:1;1876/chr7:1520:chr7:27196057-27195893:2;
1877/chr7:1520:chr7:27196057-27195893:1;1878/chr20:2983:chr20:62369510-62369349:2;1879/chr20:2983:ch
r20:62369510-62369349:1;1880/chr4:2712:chr4:174428165-174427996:2;1881/chr4:2712:chr4:174428165-174
427996:1;1882/chrX:666:chrX:39864731-39864593:2;1883/chrX:666:chrX:39864731-39864593:1;1884/chr14:2
078:chr14:102027737-102027611:2;1885/chr14:2078:chr14:102027737-102027611:1;1886/chr19:3997:chr19:4
8946521-48946346:2;1887/chr19:3997:chr19:48946521-48946346:1;1888/chr10:3445:chr10:124896849-12489
6687:2;1889/chr10:3445:chr10:124896849-124896687:1;1890/chr4:62:chr4:682961-682811:2;1891/chr4:62:chr
4:682961-682811:1;1892/chr15:2554:chr15:102029749-102029590:2;1893/chr15:2554:chr15:102029749-10202
9590:1;1894/chr17:2799:chr17:59474665-59474503:2;1895/chr17:2799:chr17:59474665-59474503:1;1896/chr1
6:660:chr16:2229076-2228944:2;1897/chr16:660:chr16:2229076-2228944:1;1898/chr7:4565:chr7:155744500-1
55744326:2;1899/chr7:4565:chr7:155744500-155744326:1;1900/chr13:452:chr13:31480856-31480703:2;1901/
chr13:452:chr13:31480856-31480703:1;1902/chr11:4451:chr11:124790958-124790807:1;1903/chr15:1535:chr1
5:76629188-76629025:2;1904/chr15:1535:chr15:76629188-76629025:1;1905/chr17:3473:chr17:73584294-7358
4119:2;1906/chr17:3473:chr17:73584294-73584119:1;1907/chr4:470:chr4:2820162-2820005:2;1908/chr4:470:c
hr4:2820162-2820005:1;1909/chr19:4895:chr19:58545695-58545521:2;1910/chr19:4895:chr19:58545695-5854
5521:1;1911/chr14:1947:chr14:101193462-101193337:2;1912/chr14:1947:chr14:101193462-101193337:1;1913/
chr1:7412:chr1:248020749-248020619:2;1914/chr1:7412:chr1:248020749-248020619:1;1915/chr13:1461:chr1
3:112723393-112723261:2;1916/chr13:1461:chr13:112723393-112723261:1;1917/chr1:831:chr1:2986962-2986
797:2;1918/chr1:831:chr1:2986962-2986797:1;1919/chr2:4739:chr2:219866229-219866058:2;1920/chr2:4739:c
hr2:219866229-219866058:1;1921/chr16:1968:chr16:31488955-31488787:2;1922/chr16:1968:chr16:31488955-
31488787:1;1923/chr9:1287:chr9:102590929-102590756:2;1924/chr9:1287:chr9:102590929-102590756:1;1925/
chr10:519:chr10:8094233-8094108:2;1926/chr10:519:chr10:8094233-8094108:1;1927/chr2:1990:chr2:6667252
6-66672387:2;1928/chr2:1990:chr2:66672526-66672387:1;1929/chr12:1258:chr12:54071195-54071036:2;1930/
chr12:1258:chr12:54071195-54071036:1;1931/chr2:3108:chr2:115919923-115919794:2;1932/chr2:3108:chr2:1
15919923-115919794:1;1933/chr18:97:chr18:5629938-5629764:2;1934/chr18:97:chr18:5629938-5629764:1;19
35/chr6:852:chr6:28945620-28945480:2;1936/chr6:852:chr6:28945620-28945480:1;1937/chr18:1256:chr18:736
28494-73628339:2;1938/chr18:1256:chr18:73628494-73628339:1;1939/chr20:2719:chr20:61703557-61703391:
2;1940/chr20:2719:chr20:61703557-61703391:1;1941/chr17:3502:chr17:73750240-73750069:2;1942/chr17:350
2:chr17:73750240-73750069:1;1943/chr11:716:chr11:2291567-2291397:2;1944/chr11:716:chr11:2291567-2291
397:1;1945/cg20154403:chr19:37407492-37407337:1;1946/chr13:1082:chr13:100649818-100649655:2;1947/c
hr13:1082:chr13:100649818-100649655:1;1948/chr4:1280:chr4:8874806-8874635:2;1949/chr4:1280:chr4:8874
806-8874635:1;1950/chr19:362:chr19:1457468-1457342:2;1951/chr13:521:chr13:37248320-37248159:2;1952/c
hr13:521:chr13:37248320-37248159:1;1953/chr8:2423:chr8:120220948-120220818:2;1954/chr8:2423:chr8:120
220948-120220818:1;1955/chr19:362:chr19:1457468-1457342:1;1956/chr18:1046:chr18:56941627-56941462:2;
1957/chr18:1046:chr18:56941627-56941462:1;1958/chr8:37:chr8:686920-686787:2;1959/chr8:37:chr8:686920-
686787:1;1960/chr8:738:chr8:11559838-11559700:2;1961/chr15:983:chr15:60297221-60297078:2;1962/chr15:
983:chr15:60297221-60297078:1;1963/chr1:3196:chr1:29101737-29101588:1;1964/chr8:656:chr8:10590098-10
589937:2;1965/chr8:656:chr8:10590098-10589937:1;1966/chr2:741:chr2:8817104-8816971:2;1967/chr2:741:ch
r2:8817104-8816971:1;1968/chr22:1308:chr22:41048689-41048519:2;1969/chr22:1308:chr22:41048689-41048
519:1;1970/chr2:5245:chr2:237082219-237082094:2;1971/chr2:5245:chr2:237082219-237082094:1;1972/chr8:
738:chr8:11559838-11559700:1;1973/chr6:1651:chr6:43970554-43970394:2;1974/chr8:3703:chr8:145105961-1
45105794:2;1975/chr8:3703:chr8:145105961-145105794:1;1976/chr6:1651:chr6:43970554-43970394:1;1977/c
hr10:2676:chr10:102507820-102507695:2;1978/chr10:2676:chr10:102507820-102507695:1;1979/chr12:51:chr1
2:679949-679781:2;1980/chr12:51:chr12:679949-679781:1;1981/chr20:1038:chr20:36012930-36012762:2;1982/
chr20:1038:chr20:36012930-36012762:1;1983/chr9:193:chr9:17579449-17579282:2;1984/chr9:193:chr9:17579
449-17579282:1;1985/chr17:2797:chr17:59473663-59473493:2;1986/chr17:2797:chr17:59473663-59473493:1;
1987/chr9:207:chr9:19127643-19127508:2;1988/chr9:207:chr9:19127643-19127508:1;1989/chr14:212:chr14:27
067457-27067296:2;1990/chr14:212:chr14:27067457-27067296:1;1991/chr5:1055:chr5:7850130-7849961:2;19
92/chr5:1055:chr5:7850130-7849961:1;1993/chr5:2559:chr5:140871584-140871410:2;1994/chr5:2559:chr5:140
871584-140871410:1;1995/chr10:3406:chr10:123922968-123922801:2;1996/chr10:3406:chr10:123922968-123
922801:1;1997/chr1:7175:chr1:235814087-235813930:2;1998/chr1:7175:chr1:235814087-235813930:1;1999/c
hr17:1218:chr17:17399245-17399076:2;2000/chr17:1218:chr17:17399245-17399076:1;2001/chr20:524:chr20:2
1376499-21376324:2;2002/chr20:524:chr20:21376499-21376324:1;2003/chr16:1850:chr16:29888423-2988825
1:2;2004/chr16:1850:chr16:29888423-29888251:1;2005/chr21:666:chr21:44037522-44037372:1;2006/chr14:34
1:chr14:37053387-37053220:2;2007/chr14:341:chr14:37053387-37053220:1;2008/chr7:3501:chr7:127672295-1
27672163:2;2009/chr7:3501:chr7:127672295-127672163:1;2010/chr13:1702:chr13:113764827-113764660:2;20
11/chr15:1417:chr15:74425719-74425593:2;2012/chr15:1417:chr15:74425719-74425593:1;2013/chr2:1902:chr
2:63274880-63274709:2;2014/chr2:1902:chr2:63274880-63274709:1;2015/chr19:3999:chr19:48947276-489471
49:2;2016/chr19:3999:chr19:48947276-48947149:1;2017/chr15:201:chr15:27017671-27017545:2;2018/chr15:2
01:chr15:27017671-27017545:1;2019/chr2:2063:chr2:71116196-71116030:2;2020/chr2:2063:chr2:71116196-71
116030:1;2021/chr13:1702:chr13:113764827-113764660:1;2022/chr13:1468:chr13:112727861-112727691:2;20
23/chr13:1468:chr13:112727861-112727691:1;2024/chr12:1318:chr12:54427146-54427021:2;2025/chr12:1318:
chr12:54427146-54427021:1;2026/chr5:2324:chr5:134364064-134363929:2;2027/chr5:2324:chr5:134364064-1
34363929:1;2028/chr5:2254:chr5:132161540-132161380:2;2029/chr5:2254:chr5:132161540-132161380:1;2030/
chr1:3435:chr1:34642568-34642402:2;2031/chr1:3435:chr1:34642568-34642402:1;2032/chr5:1614:chr5:60922
327-60922152:2;2033/chr5:1614:chr5:60922327-60922152:1;2034/chr5:1926:chr5:92906541-92906387:2;2035/
chr5:1926:chr5:92906541-92906387:1;2036/chr3:3063:chr3:179754937-179754800:2;2037/chr3:3063:chr3:179
754937-179754800:1;2038/chr11:4451:chr11:124791078-124790904:2;2039/chr11:4451:chr11:124791078-124
790904:1;2040/chr19:4796:chr19:56988748-56988623:2;2041/chr19:4796:chr19:56988748-56988623:1;2042/c
hr11:2133:chr11:61277193-61277028:2;2043/chr11:2133:chr11:61277193-61277028:1;2044/chr9:2143:chr9:13
2651033-132650862:2;2045/chr9:2143:chr9:132651033-132650862:1;2046/chr9:1080:chr9:96721017-9672085
0:2;2047/chr9:1080:chr9:96721017-96720850:1;2048/chr1:252:chr1:1565757-1565583:2;2049/chr1:252:chr1:15
65757-1565583:1;2050/chr1:5180:chr1:151811126-151810980:2;2051/chr1:5180:chr1:151811126-151810980:1;
2052/chr17:1316:chr17:19628259-19628097:2;2053/chr17:1316:chr17:19628259-19628097:1;2054/chr6:105:c
hr6:1393360-1393202:2;2055/chr6:105:chr6:1393360-1393202:1;2056/chrX:784:chrX:47433679-47433504:2;20
57/chrX:784:chrX:47433679-47433504:1;2058/cg13648501:chr5:142785401-142785227:1;2059/chr22:1894:chr
22:46658821-46658647:2;2060/chr22:1894:chr22:46658821-46658647:1;2061/chr16:2389:chr16:51186650-511
86483:2;2062/chr16:2389:chr16:51186650-51186483:1;2063/chr16:3092:chr16:73097048-73096882:2;2064/chr
16:3092:chr16:73097048-73096882:1;2065/chr21:861:chr21:45577597-45577453:1;2066/chr13:356:chr13:2854
9930-28549805:2;2067/chr13:356:chr13:28549930-28549805:1;2068/chr3:762:chr3:32859418-32859245:2;206
9/chr9:1374:chr9:112081646-112081476:2;2070/chr9:1374:chr9:112081646-112081476:1;2071/chr3:1771:chr3:
73673886-73673714:2;2072/chr20:3023:chr20:62463531-62463392:2;2073/chr20:3023:chr20:62463531-62463
392:1;2074/chr8:2241:chr8:99961013-99960887:2;2075/chr8:2241:chr8:99961013-99960887:1;2076/chr3:1771:
chr3:73673886-73673714:1;2077/chr19:1699:chr19:13215597-13215426:2;2078/chr19:1699:chr19:13215597-1
3215426:1;2079/cg05894124:chr4:81186830-81186655:1;2080/chr19:1946:chr19:16436418-16436244:2;2081/
chr22:1367:chr22:42679589-42679463:2;2082/chr22:1367:chr22:42679589-42679463:1;2083/chr5:514:chr5:18
87550-1887384:2;2084/chr5:514:chr5:1887550-1887384:1;2085/chr19:566:chr19:2290446-2290321:2;2086/chr
19:566:chr19:2290446-2290321:1;2087/chr6:458:chr6:12750408-12750283:1;2088/chr9:1083:chr9:96722731-9
6722591:2;2089/chr9:1083:chr9:96722731-96722591:1;2090/cg19897940:chr11:128563741-128563566:1;2091/
cg13755070:chr11:128563741-128563566:1;2092/chr8:2179:chr8:97157246-97157113:2;2093/chr8:2179:chr8:
97157246-97157113:1;2094/chr8:42:chr8:688944-688784:2;2095/chr8:42:chr8:688944-688784:1;2096/chr5:245
0:chr5:138730101-138729956:2;2097/chr5:2450:chr5:138730101-138729956:1;2098/chr13:289:chr13:2662585
6-26625713:2;2099/chr17:1316:chr17:19627962-19627832:2;2100/chr17:1316:chr17:19627962-19627832:1;21
01/chr4:2434:chr4:140656830-140656659:2;2102/chr4:2434:chr4:140656830-140656659:1;2103/chr13:289:chr
13:26625856-26625713:1;2104/chr14:1682:chr14:97499784-97499619:2;2105/chr14:1682:chr14:97499784-974
99619:1;2106/chr2:3996:chr2:162279999-162279833:2;2107/chr2:3996:chr2:162279999-162279833:1;2108/chr
1:3496:chr1:36772265-36772094:2;2109/chr1:3496:chr1:36772265-36772094:1;2110/chr3:5:chr3:238818-2386
55:2;2111/chr3:5:chr3:238818-238655:1;2112/chr2:118:chr2:946626-946498:2;2113/chr2:118:chr2:946626-946
498:1;2114/chr8:1788:chr8:57358424-57358277:2;2115/chr8:1788:chr8:57358424-57358277:1;2116/chr19:407
5:chr19:49576171-49576037:2;2117/chr19:4075:chr19:49576171-49576037:1;2118/chr8:3703:chr8:145106221-
145106096:2;2119/chr8:3703:chr8:145106221-145106096:1;2120/chr19:4862:chr19:58038992-58038821:2;212
1/chr19:4862:chr19:58038992-58038821:1;2122/chr3:762:chr3:32859418-32859245:1;2123/chr2:3031:chr2:111
876887-111876722:2;2124/chr2:3031:chr2:111876887-111876722:1;2125/chr19:1946:chr19:16436418-164362
44:1;2126/chr9:1226:chr9:100617372-100617224:2;2127/chr9:1226:chr9:100617372-100617224:1;2128/chr11:
1094:chr11:7695189-7695022:2;2129/chr11:1094:chr11:7695189-7695022:1;2130/chr18:1140:chr18:67068544-
67068411:2;2131/chr18:1140:chr18:67068544-67068411:1;2132/chr3:3517:chr3:196256098-196255933:1;2133/
chr10:846:chr10:21789396-21789223:2;2134/chr10:846:chr10:21789396-21789223:1;2135/chr4:207:chr4:1400
965-1400833:2;2136/chr4:207:chr4:1400965-1400833:1;2137/chr12:2984:chr12:129338396-129338238:2;2138/
chr12:2984:chr12:129338396-129338238:1;2139/chr7:3112:chr7:100091504-100091379:2;2140/chr7:3112:chr7:
100091504-100091379:1;2141/chr10:1133:chr10:35929187-35929052:2;2142/chr10:1133:chr10:35929187-359
29052:1;2143/chr16:3092:chr16:73096989-73096817:2;2144/chr16:3092:chr16:73096989-73096817:1;2145/chr
4:1481:chr4:20256936-20256773:2;2146/chr4:1481:chr4:20256936-20256773:1;2147/chr1:6929:chr1:22860417
0-228604000:2;2148/chr1:6929:chr1:228604170-228604000:1;2149/chr8:2241:chr8:99960735-99960610:2;215
0/chr8:2241:chr8:99960735-99960610:1;2151/chr8:1018:chr8:22446986-22446819:2;2152/chr8:1018:chr8:2244
6986-22446819:1;2153/chr6:1788:chr6:54711556-54711416:2;2154/chr6:1788:chr6:54711556-54711416:1;215
5/chr22:2705:chr22:50629239-50629099:2;2156/chr22:2705:chr22:50629239-50629099:1;2157/chr10:1049:chr
10:30024128-30024001:2;2158/chr10:1049:chr10:30024128-30024001:1;2159/chr4:1509:chr4:24801714-24801
588:2;2160/chr4:1509:chr4:24801714-24801588:1;2161/chr19:2725:chr19:31839783-31839634:2;2162/chr19:2
725:chr19:31839783-31839634:1;2163/chr14:761:chr14:65210288-65210120:1;2164/chr9:3295:chr9:13909375
4-139093592:2;2165/chr9:3295:chr9:139093754-139093592:1;2166/chr17:965:chr17:10101721-10101546:2;21
67/chr17:965:chr17:10101721-10101546:1;2168/chr5:829:chr5:3595594-3595419:2;2169/chr5:829:chr5:359559
4-3595419:1;2170/chr20:1991:chr20:57224798-57224633:2;2171/chr20:1991:chr20:57224798-57224633:1;217
2/chr5:1190:chr5:16180094-16179920:2;2173/chr5:1190:chr5:16180094-16179920:1;2174/chr1:7175:chr1:2358
14031-235813859:2;2175/chr1:7175:chr1:235814031-235813859:1;2176/chr13:982:chr13:96294647-96294495:
2;2177/chr13:982:chr13:96294647-96294495:1;2178/chr8:650:chr8:10587741-10587582:2;2179/chr8:650:chr8:
10587741-10587582:1;2180/chr5:535:chr5:1931448-1931286:2;2181/chr5:535:chr5:1931448-1931286:1;2182/c
hr11:4451:chr11:124791311-124791151:2;2183/chr11:4451:chr11:124791311-124791151:1;2184/chr1:3371:chr
1:32828107-32827982:2;2185/chr1:3371:chr1:32828107-32827982:1;2186/chr18:1360:chr18:74962552-749623
98:2;2187/chr18:1360:chr18:74962552-74962398:1;2188/chr5:3534:chr5:177540862-177540706:2;2189/chr5:3
534:chr5:177540862-177540706:1;2190/chr13:356:chr13:28550147-28549986:2;2191/chr13:356:chr13:285501
47-28549986:1;2192/chr2:2063:chr2:71116119-71115961:2;2193/chr2:2063:chr2:71116119-71115961:1;2194/c
hr2:5245:chr2:237081989-237081834:2;2195/chr2:5245:chr2:237081989-237081834:1;2196/chr4:56:chr4:6759
70-675805:2;2197/chr4:56:chr4:675970-675805:1;2198/chr19:1577:chr19:11689972-11689797:2;2199/chr14:26
62:chr14:105553375-105553205:2;2200/chr14:2662:chr14:105553375-105553205:1;2201/chr19:3873:chr19:46
997042-46996898:2;2202/chr19:3873:chr19:46997042-46996898:1;2203/chr15:935:chr15:58357280-58357155:
2;2204/chr15:935:chr15:58357280-58357155:1;2205/chr19:3157:chr19:37096069-37095941:2;2206/chr19:3157:
chr19:37096069-37095941:1;2207/chr13:236:chr13:25320207-25320065:2;2208/chr13:236:chr13:25320207-25
320065:1;2209/chr1:4824:chr1:110611655-110611485:2;2210/chr1:4824:chr1:110611655-110611485:1;2211/c
hr14:761:chr14:65210188-65210035:1;2212/chr5:1718:chr5:72677831-72677688:1;2213/chr5:3916:chr5:18001
8422-180018295:2;2214/chr5:3916:chr5:180018422-180018295:1;2215/chr14:157:chr14:24780464-24780321:2;
2216/chr14:157:chr14:24780464-24780321:1;2217/chr20:476:chr20:20346256-20346131:2;2218/chr20:476:chr
20:20346256-20346131:1;2219/chr18:1611:chr18:76739890-76739715:2;2220/chr18:1611:chr18:76739890-767
39715:1;2221/chr9:55:chr9:1045795-1045621:2;2222/chr15:2253:chr15:95388723-95388583:1;2223/chr9:1218:
chr9:100611133-100610988:1;2224/chr20:2928:chr20:62119869-62119697:2;2225/chr20:2928:chr20:62119869-
62119697:1;2226/cg14732998:chr19:37997948-37997775:1;2227/cg04977834:chr17:70114728-70114568:1;2
228/chr22:1921:chr22:46932455-46932290:2;2229/chr18:966:chr18:53447721-53447546:2;2230/chr18:966:chr
18:53447721-53447546:1;2231/chr14:322:chr14:36986961-36986799:2;2232/chr14:322:chr14:36986961-36986
799:1;2233/chr13:657:chr13:49795354-49795220:2;2234/chr13:657:chr13:49795354-49795220:1;2235/chr4:29
81:chr4:189203933-189203759:1;2236/chr14:387:chr14:38064459-38064284:2;2237/chr14:387:chr14:3806445
9-38064284:1;2238/chr7:811:chr7:2968715-2968540:2;2239/chr7:811:chr7:2968715-2968540:1;2240/chr8:42:c
hr8:689209-689063:2;2241/chr20:1878:chr20:55965620-55965464:2;2242/chr8:42:chr8:689209-689063:1;2243/
chr14:229:chr14:29236491-29236319:1;2244/chr17:965:chr17:10101749-10101612:2;2245/chr17:965:chr17:10
101749-10101612:1;2246/chr2:4131:chr2:172964990-172964837:2;2247/chr2:4131:chr2:172964990-17296483
7:1;2248/chr16:2476:chr16:54971240-54971069:2;2249/chr16:2476:chr16:54971240-54971069:1;2250/chr22:1
248:chr22:40058246-40058099:2;2251/chr22:1248:chr22:40058246-40058099:1;2252/chr6:92:chr6:1314071-13
13903:2;2253/chr6:92:chr6:1314071-1313903:1;2254/chr19:3321:chr19:39087049-39086878:2;2255/cg140634
88:chr4:154709962-154709789:2;2256/chr8:40:chr8:688238-688094:2;2257/chr8:40:chr8:688238-688094:1;225
8/chr19:4173:chr19:50393822-50393661:2;2259/chr19:4173:chr19:50393822-50393661:1;2260/chr12:3097:chr
12:130648364-130648191:2;2261/chr16:693:chr16:2392209-2392043:2;2262/chr16:693:chr16:2392209-239204
3:1;2263/chr19:1696:chr19:13210443-13210306:2;2264/chr19:1696:chr19:13210443-13210306:1;2265/chr7:25
89:chr7:70597010-70596879:2;2266/chr7:2589:chr7:70597010-70596879:1;2267/chr19:369:chr19:1470457-147
0288:2;2268/chr8:3776:chr8:145806482-145806341:2;2269/chr8:3776:chr8:145806482-145806341:1;2270/chr6:
138:chr6:1614739-1614564:2;2271/chr7:3421:chr7:115850724-115850555:2;2272/chr7:3421:chr7:115850724-
115850555:1;2273/chr17:3789:chr17:76127531-76127386:2;2274/chr16:393:chr16:1211002-1210828:2;2275/c
hr17:3789:chr17:76127531-76127386:1;2276/chr15:2003:chr15:89922511-89922386:2;2277/chr15:2003:chr15:
89922511-89922386:1;2278/chr5:1488:chr5:50695381-50695212:1;2279/chr19:2895:chr19:34113185-3411302
1:2;2280/chr19:2895:chr19:34113185-34113021:1;2281/chr17:2535:chr17:48546291-48546116:2;2282/chr17:2
535:chr17:48546291-48546116:1;2283/chr15:275:chr15:29131172-29131010:2;2284/chr15:275:chr15:2913117
2-29131010:1;2285/chr14:1633:chr14:96343605-96343434:2;2286/chr14:1633:chr14:96343605-96343434:1;22
87/chr1:831:chr1:2986898-2986760:2;2288/chr8:3309:chr8:143545744-143545576:2;2289/chr1:831:chr1:29868
98-2986760:1;2290/chr13:85:chr13:20875956-20875812:2;2291/chr13:85:chr13:20875956-20875812:1;2292/ch
r19:3321:chr19:39087049-39086878:1;2293/cg14063488:chr4:154709962-154709789:1;2294/chr15:428:chr15:
31775864-31775732:2;2295/chr15:428:chr15:31775864-31775732:1;2296/chr12:3097:chr12:130648364-13064
8191:1;2297/chr14:2078:chr14:102027359-102027205:2;2298/chr14:2078:chr14:102027359-102027205:1;2299/
chr19:369:chr19:1470457-1470288:1;2300/chr14:627:chr14:59932292-59932118:2;2301/chr14:627:chr14:5993
2292-59932118:1;2302/chr6:138:chr6:1614739-1614564:1;2303/chr13:870:chr13:79176685-79176553:2;2304/c
hr13:870:chr13:79176685-79176553:1;2305/chr12:1457:chr12:58120498-58120333:2;2306/chr12:1457:chr12:5
8120498-58120333:1;2307/chr11:4166:chr11:119211747-119211591:1;2308/chr19:4874:chr19:58238801-5823
8653:2;2309/chr19:4874:chr19:58238801-58238653:1;2310/chr20:946:chr20:32857033-32856874:2;2311/chr20:
946:chr20:32857033-32856874:1;2312/chr3:1158:chr3:48699451-48699308:2;2313/chr3:1158:chr3:48699451-
48699308:1;2314/chr21:324:chr21:38077002-38076829:2;2315/chr21:324:chr21:38077002-38076829:1;2316/c
hr15:937:chr15:58357884-58357758:2;2317/chr15:937:chr15:58357884-58357758:1;2318/chr15:1417:chr15:74
426014-74425875:2;2319/chr15:1417:chr15:74426014-74425875:1;2320/chr10:3180:chr10:118899951-118899
778:1;2321/chr1:3953:chr1:47899807-47899633:2;2322/chr1:3953:chr1:47899807-47899633:1;2323/chr4:1403:
chr4:13544317-13544188:1;2324/chr4:1277:chr4:8873263-8873134:2;2325/chr4:1277:chr4:8873263-8873134:1;
2326/chr1:3150:chr1:27687495-27687333:2;2327/chr1:3150:chr1:27687495-27687333:1;2328/chr4:5:chr4:107
968-107807:2;2329/chr4:5:chr4:107968-107807:1;2330/chr9:629:chr9:79635631-79635477:2;2331/chr2:4189:c
hr2:175202290-175202156:2;2332/chr2:4189:chr2:175202290-175202156:1;2333/chr10:4068:chr10:131771311-
131771167:2;2334/chr10:4068:chr10:131771311-131771167:1;2335/chr18:487:chr18:22929844-22929696:2;2
336/chr10:2949:chr10:108924567-108924400:2;2337/chr17:537:chr17:4804329-4804197:2;2338/chr17:537:chr
17:4804329-4804197:1;2339/chr9:1188:chr9:99482461-99482320:2;2340/chr9:1188:chr9:99482461-99482320:
1;2341/chr16:2827:chr16:66613416-66613250:2;2342/chr16:2827:chr16:66613416-66613250:1;2343/chr5:2364:
chr5:134871181-134871007:2;2344/chr5:2364:chr5:134871181-134871007:1;2345/chr15:2011:chr15:8995115
5-89951009:2;2346/chr15:2011:chr15:89951155-89951009:1;2347/chr11:3664:chr11:94277790-94277617:2;23
48/chr1:3845:chr1:44704224-44704069:2;2349/chr1:3845:chr1:44704224-44704069:1;2350/chr2:1925:chr2:632
86370-63286198:2;2351/chr3:2518:chr3:133393625-133393497:2;2352/chr3:2518:chr3:133393625-133393497:
1;2353/chr2:4945:chr2:231693141-231693011:2;2354/chr2:4945:chr2:231693141-231693011:1;2355/chr2:1925:
chr2:63286370-63286198:1;2356/chr8:40:chr8:688484-688312:2;2357/chr8:40:chr8:688484-688312:1;2358/chr
11:3664:chr11:94277790-94277617:1;2359/chr9:1980:chr9:130689715-130689590:2;2360/chr9:1980:chr9:1306
89715-130689590:1;2361/chr8:3701:chr8:145104144-145104019:2;2362/chr8:3701:chr8:145104144-14510401
9:1;2363/chr8:2051:chr8:80804177-80804024:2;2364/chr7:3315:chr7:103630125-103630000:2;2365/chr7:3315:
chr7:103630125-103630000:1;2366/chr9:629:chr9:79635631-79635477:1;2367/chr16:726:chr16:2835441-2835
301:2;2368/chr16:726:chr16:2835441-2835301:1;2369/chr13:1184:chr13:109793087-109792920:2;2370/chr13:
1184:chr13:109793087-109792920:1;2371/chr19:2231:chr19:18980752-18980624:2;2372/chr19:2231:chr19:18
980752-18980624:1;2373/chr7:3112:chr7:100091571-100091421:2;2374/chr7:3112:chr7:100091571-10009142
1:1;2375/chr5:2195:chr5:127873559-127873397:2;2376/chr5:2195:chr5:127873559-127873397:1;2377/chr14:2
086:chr14:102057195-102057023:1;2378/chr19:3998:chr19:48946725-48946585:2;2379/chr19:3998:chr19:489
46725-48946585:1;2380/cg03298319:chr14:33403125-33402950:1;2381/chr16:2445:chr16:54324557-5432443
0:2;2382/chr2:5386:chr2:239072810-239072648:2;2383/chr2:5386:chr2:239072810-239072648:1;2384/chr14:3
97:chr14:38091610-38091436:2;2385/chr14:397:chr14:38091610-38091436:1;2386/chr1:3867:chr1:45082905-4
5082774:2;2387/chr1:3867:chr1:45082905-45082774:1;2388/chr14:2833:chr14:106320742-106320572:2;2389/
chr11:2506:chr11:65408750-65408579:2;2390/chr13:518:chr13:37005966-37005791:2;2391/chr13:518:chr13:3
7005966-37005791:1;2392/chr17:3474:chr17:73584759-73584589:2;2393/chr1:4957:chr1:115632197-1156320
25:2;2394/chr1:4957:chr1:115632197-115632025:1;2395/chr5:839:chr5:3602462-3602337:2;2396/chr5:839:chr
5:3602462-3602337:1;2397/chrX:503:chrX:21676497-21676339:2;2398/chrX:503:chrX:21676497-21676339:1;2
399/chr9:1070:chr9:96714415-96714285:2;2400/chr9:1070:chr9:96714415-96714285:1;2401/chr1:3916:chr1:46
951712-46951543:2;2402/chr1:3916:chr1:46951712-46951543:1;2403/chr17:2307:chr17:45786630-45786466:2;
2404/chr17:2307:chr17:45786630-45786466:1;2405/chr10:2874:chr10:105344832-105344671:2;2406/chr10:28
74:chr10:105344832-105344671:1;2407/chr14:688:chr14:61747024-61746883:2;2408/chr14:688:chr14:617470
24-61746883:1;2409/chr16:3863:chr16:86963006-86962832:1;2410/chr17:1933:chr17:38334321-38334151:2;2
411/chr13:1687:chr13:113699564-113699389:2;2412/chr15:1556:chr15:76638648-76638475:2;2413/chr8:1101:
chr8:23584680-23584524:2;2414/chr18:763:chr18:44336779-44336618:2;2415/chr18:763:chr18:44336779-443
36618:1;2416/chr12:1118:chr12:52115685-52115513:2;2417/chr12:1118:chr12:52115685-52115513:1;2418/chr
4:2398:chr4:135122848-135122677:2;2419/cg27547954:chr1:76082092-76081923:1;2420/chr12:1296:chr12:54
355667-54355516:1;2421/chr17:4148:chr17:77814286-77814117:2;2422/chr17:4148:chr17:77814286-7781411
7:1;2423/chr19:2231:chr19:18980885-18980714:2;2424/chr19:2231:chr19:18980885-18980714:1;2425/chr4:23
98:chr4:135122848-135122677:1;2426/chr5:2325:chr5:134364525-134364359:2;2427/chr5:2325:chr5:1343645
25-134364359:1;2428/chr22:163:chr22:19711924-19711764:2;2429/chr22:163:chr22:19711924-19711764:1;24
30/chr3:2978:chr3:170137582-170137429:2;2431/chr3:2978:chr3:170137582-170137429:1;2432/chr4:2647:chr
4:164264966-164264821:2;2433/chr4:2647:chr4:164264966-164264821:1;2434/chr1:3845:chr1:44704172-4470
3998:2;2435/chr1:3845:chr1:44704172-44703998:1;2436/chr1:4624:chr1:91183323-91183196:2;2437/chr8:174
4:chr8:55382938-55382776:2;2438/chr8:1744:chr8:55382938-55382776:1;2439/chr3:2897:chr3:157821637-157
821493:2;2440/chr3:2897:chr3:157821637-157821493:1;2441/chr7:4153:chr7:150812229-150812057:2;2442/c
hr7:4153:chr7:150812229-150812057:1;2443/chr19:3497:chr19:41106377-41106210:2;2444/chr19:3497:chr19:
41106377-41106210:1;2445/chr13:1060:chr13:100608190-100608021:2;2446/chr3:220:chr3:10857967-108578
26:2;2447/chr3:220:chr3:10857967-10857826:1;2448/chr15:1086:chr15:65116160-65116014:2;2449/chr15:108
6:chr15:65116160-65116014:1;2450/chr8:1744:chr8:55383226-55383051:2;2451/chr8:1744:chr8:55383226-553
83051:1;2452/chr8:1350:chr8:37556046-37555873:2;2453/chr2:4122:chr2:172948139-172947964:2;2454/chr2:
4122:chr2:172948139-172947964:1;2455/chr18:637:chr18:35065277-35065105:2;2456/chr10:4449:chr10:1339
99214-133999086:2;2457/chr10:4449:chr10:133999214-133999086:1;2458/chr20:925:chr20:32256030-322559
05:2;2459/chr20:925:chr20:32256030-32255905:1;2460/chr7:811:chr7:2968367-2968192:2;2461/chr7:811:chr7:
2968367-2968192:1;2462/chr1:4908:chr1:113052067-113051902:2;2463/chr7:2148:chr7:49815450-49815286:2;
2464/chr7:2148:chr7:49815450-49815286:1;2465/chr9:1343:chr9:110250594-110250466:2;2466/chr9:1343:chr
9:110250594-110250466:1;2467/chr1:4908:chr1:113052067-113051902:1;2468/chr20:2928:chr20:62119971-62
119827:2;2469/chr20:2928:chr20:62119971-62119827:1;2470/chr18:637:chr18:35065277-35065105:1;2471/chr
19:3278:chr19:38886717-38886583:2;2472/chr19:3278:chr19:38886717-38886583:1;2473/chr10:2794:chr10:10
3539053-103538883:2;2474/chr10:2794:chr10:103539053-103538883:1;2475/chr10:2898:chr10:106028659-10
6028486:2;2476/chr14:157:chr14:24780839-24780665:2;2477/chr14:157:chr14:24780839-24780665:1;2478/chr
7:4786:chr7:157406423-157406254:2;2479/chr19:2540:chr19:30017380-30017217:2;2480/chr19:2540:chr19:30
017380-30017217:1;2481/chr19:1722:chr19:13616996-13616867:2;2482/chr19:1722:chr19:13616996-1361686
7:1;2483/chr2:259:chr2:1748402-1748230:2;2484/chr2:259:chr2:1748402-1748230:1;2485/chr18:1044:chr18:56
940406-56940232:2;2486/chr18:1044:chr18:56940406-56940232:1;2487/chr17:2175:chr17:43045036-4304486
1:2;2488/chr15:1086:chr15:65116218-65116090:2;2489/chr15:1086:chr15:65116218-65116090:1;2490/chr5:82
7:chr5:3594626-3594465:2;2491/chr5:827:chr5:3594626-3594465:1;2492/chr7:2143:chr7:49813614-49813457:
2;2493/chr7:2143:chr7:49813614-49813457:1;2494/chr1:254:chr1:1566696-1566533:2;2495/chr1:254:chr1:156
6696-1566533:1;2496/chr12:787:chr12:33593020-33592846:2;2497/chr12:787:chr12:33593020-33592846:1;24
98/chr20:752:chr20:25565828-25565656:2;2499/chr20:752:chr20:25565828-25565656:1;2500/chr19:369:chr19:
1470324-1470155:2;2501/chr19:4944:chr19:58908209-58908046:2;2502/chr19:4944:chr19:58908209-5890804
6:1;2503/chr19:553:chr19:2252403-2252228:2;2504/chr19:553:chr19:2252403-2252228:1;2505/chr10:1956:chr
10:73847427-73847253:2;2506/chr10:1956:chr10:73847427-73847253:1;2507/chr8:728:chr8:11538082-115379
54:2;2508/chr8:728:chr8:11538082-11537954:1;2509/chr19:2193:chr19:18771306-18771161:2;2510/chr6:138:c
hr6:1615052-1614927:2;2511/chr9:2530:chr9:136293676-136293533:2;2512/chr9:2530:chr9:136293676-13629
3533:1;2513/chr2:5420:chr2:239755961-239755791:2;2514/chr2:5420:chr2:239755961-239755791:1;2515/chr6:
138:chr6:1615052-1614927:1;2516/chr16:110:chr16:744330-744162:2;2517/chr16:110:chr16:744330-744162:1;
2518/chr17:309:chr17:2627897-2627740:2;2519/chr17:309:chr17:2627897-2627740:1;2520/chr13:1060:chr13:
100608540-100608369:2;2521/chr13:1060:chr13:100608540-100608369:1;2522/chr11:2506:chr11:65408580-6
5408406:2;2523/chr11:2506:chr11:65408580-65408406:1;2524/chr18:891:chr18:47794997-47794822:1;2525/c
hr1:4372:chr1:63790019-63789889:2;2526/chr1:4372:chr1:63790019-63789889:1;2527/chr15:1200:chr15:6812
0646-68120487:2;2528/chr15:1200:chr15:68120646-68120487:1;2529/chr9:1188:chr9:99482349-99482174:2;2
530/chr9:1188:chr9:99482349-99482174:1;2531/chr8:1350:chr8:37555990-37555815:2;2532/chr8:1350:chr8:37
555990-37555815:1;2533/chr6:2263:chr6:108489895-108489726:2;2534/chr1:5286:chr1:154475206-15447503
1:2;2535/chr10:2027:chr10:77159083-77158919:2;2536/chr10:2027:chr10:77159083-77158919:1;2537/chr1:52
86:chr1:154475206-154475031:1;2538/chr5:2048:chr5:112539112-112538947:2;2539/chr5:2048:chr5:1125391
12-112538947:1;2540/chr15:753:chr15:45479590-45479420:2;2541/chr15:753:chr15:45479590-45479420:1;25
42/chr16:757:chr16:3017558-3017426:1;2543/chr2:4183:chr2:175200640-175200506:2;2544/chr2:4183:chr2:17
5200640-175200506:1;2545/chr9:2530:chr9:136293794-136293619:2;2546/chr9:2530:chr9:136293794-136293
619:1;2547/chr21:1265:chr21:47062423-47062264:2;2548/chr21:1265:chr21:47062423-47062264:1;2549/chr2:
1376:chr2:29033898-29033723:2;2550/chr2:1376:chr2:29033898-29033723:1;2551/chr12:428:chr12:6664942-6
664801:2;2552/chr12:428:chr12:6664942-6664801:1;2553/chr19:3873:chr19:46997239-46997102:2;2554/chr19:
3873:chr19:46997239-46997102:1;2555/chr11:117:chr11:725876-725704:2;2556/chr11:117:chr11:725876-725
704:1;2557/chr10:4752:chr10:134862411-134862284:2;2558/cg15674193:chr2:238536007-238535834:2;2559/
cg15674193:chr2:238536007-238535834:1;2560/chr16:4191:chr16:88701134-88701002:2;2561/chr16:4191:chr
16:88701134-88701002:1;2562/chr14:1137:chr14:77492380-77492248:2;2563/chr14:1137:chr14:77492380-774
92248:1;2564/chr10:4752:chr10:134862411-134862284:1;2565/chr8:2284:chr8:102506107-102505949:2;2566/
chr8:2284:chr8:102506107-102505949:1;2567/chr5:1055:chr5:7850071-7849896:2;2568/chr5:1055:chr5:78500
71-7849896:1;2569/chr5:1850:chr5:79331278-79331104:2;2570/chr5:1850:chr5:79331278-79331104:1;2571/ch
r1:4827:chr1:110613397-110613272:2;2572/chr1:4827:chr1:110613397-110613272:1;2573/chr19:3833:chr19:4
6443496-46443322:2;2574/chr19:3833:chr19:46443496-46443322:1;2575/chr17:4511:chr17:79615448-796153
21:2;2576/chr17:4511:chr17:79615448-79615321:1;2577/chr7:1376:chr7:23245651-23245480:2;2578/chr7:137
6:chr7:23245651-23245480:1;2579/chr15:264:chr15:28352821-28352655:2;2580/chr15:264:chr15:28352821-28
352655:1;2581/chr10:2350:chr10:88728518-88728344:2;2582/chr10:2350:chr10:88728518-88728344:1;2583/c
hr17:2799:chr17:59474379-59474254:2;2584/chr15:2015:chr15:89952706-89952533:2;2585/chr15:2015:chr15:
89952706-89952533:1;2586/chr17:2799:chr17:59474379-59474254:1;2587/chr2:1264:chr2:26408202-2640802
9:2;2588/chr2:1264:chr2:26408202-26408029:1;2589/chr8:651:chr8:10588041-10587910:2;2590/chr8:651:chr8:
10588041-10587910:1;2591/chr5:1410:chr5:40682164-40681990:2;2592/chr5:1410:chr5:40682164-40681990:1;
2593/chr14:354:chr14:37127981-37127809:1;2594/chr16:2526:chr16:55543217-55543042:2;2595/chr16:2526:
chr16:55543217-55543042:1;2596/chr1:2371:chr1:16085782-16085615:2;2597/chr1:2371:chr1:16085782-1608
5615:1;2598/chr10:1049:chr10:30024428-30024286:2;2599/chr10:1049:chr10:30024428-30024286:1;2600/chr1
5:203:chr15:27018841-27018713:2;2601/chr15:203:chr15:27018841-27018713:1;2602/chr21:861:chr21:455779
24-45577757:2;2603/chr21:861:chr21:45577924-45577757:1;2604/chr6:2384:chr6:117086916-117086743:2;26
05/chr6:2384:chr6:117086916-117086743:1;2606/chr19:369:chr19:1470324-1470155:1;2607/chr19:392:chr19:1
524198-1524069:2;2608/chr19:392:chr19:1524198-1524069:1;2609/chr19:2193:chr19:18771306-18771161:1;2
610/chr21:333:chr21:38081403-38081231:2;2611/chr21:333:chr21:38081403-38081231:1;2612/chr12:464:chr1
2:7592832-7592706:2;2613/chr12:464:chr12:7592832-7592706:1;2614/chr6:2263:chr6:108489895-108489726:
1;2615/chr2:1519:chr2:39187419-39187294:2;2616/chr2:1519:chr2:39187419-39187294:1;2617/chr2:2631:chr2:
99439369-99439201:2;2618/chr2:2631:chr2:99439369-99439201:1;2619/chr8:728:chr8:11537844-11537669:2;
2620/chr8:728:chr8:11537844-11537669:1;2621/chr7:1552:chr7:27225264-27225111:2;2622/chr7:1552:chr7:27
225264-27225111:1;2623/chr20:764:chr20:26189263-26189094:2;2624/chr20:764:chr20:26189263-26189094:1;
2625/chr14:2165:chr14:103395785-103395613:2;2626/chr14:2165:chr14:103395785-103395613:1;2627/chr2:4
214:chr2:176945075-176944913:2;2628/chr2:4214:chr2:176945075-176944913:1;2629/chr8:3702:chr8:145105
760-145105618:2;2630/chr8:3702:chr8:145105760-145105618:1;2631/chr10:4868:chr10:135015757-13501558
4:2;2632/chr10:4868:chr10:135015757-135015584:1;2633/chr2:4218:chr2:176948297-176948168:2;2634/chr2:
4218:chr2:176948297-176948168:1;2635/chr11:3710:chr11:100999084-100998915:2;2636/chr11:3710:chr11:1
00999084-100998915:1;2637/chr17:279:chr17:1962683-1962534:1;2638/chr4:1604:chr4:37247113-37246974:2;
2639/chr4:1604:chr4:37247113-37246974:1;2640/chr8:2181:chr8:97158066-97157894:2;2641/chr8:2181:chr8:
97158066-97157894:1;2642/chr7:1514:chr7:27187677-27187502:2;2643/chr7:1514:chr7:27187677-27187502:1;
2644/chr8:1101:chr8:23584680-23584524:1;2645/chr17:1243:chr17:17626082-17625913:2;2646/chr17:1243:c
hr17:17626082-17625913:1;2647/chr7:3315:chr7:103630346-103630184:2;2648/chr7:3315:chr7:103630346-10
3630184:1;2649/chr20:62:chr20:982972-982798:2;2650/chr20:62:chr20:982972-982798:1;2651/chr3:392:chr3:1
3324257-13324082:2;2652/chr3:392:chr3:13324257-13324082:1;2653/chr13:1456:chr13:112721494-11272132
0:2;2654/chr13:1456:chr13:112721494-112721320:1;2655/chr1:3916:chr1:46951428-46951253:2;2656/chr1:39
16:chr1:46951428-46951253:1;2657/chr6:2032:chr6:88876633-88876458:2;2658/chr6:2032:chr6:88876633-888
76458:1;2659/chr5:91:chr5:528704-528579:2;2660/chr5:91:chr5:528704-528579:1;2661/chr16:3825:chr16:8654
4686-86544555:2;2662/chr16:3825:chr16:86544686-86544555:1;2663/chr14:2041:chr14:101925746-10192557
1:2;2664/chr14:2041:chr14:101925746-101925571:1;2665/chr1:4624:chr1:91183323-91183196:1;2666/chr13:1
060:chr13:100608190-100608021:1;2667/chr5:2254:chr5:132161425-132161269:2;2668/chr5:2254:chr5:13216
1425-132161269:1;2669/chr9:431:chr9:37002824-37002679:2;2670/chr9:431:chr9:37002824-37002679:1;2671/
chr3:20:chr3:2140592-2140466:2;2672/chr3:20:chr3:2140592-2140466:1;2673/chr8:1350:chr8:37556046-37555
873:1;2674/chr1:4371:chr1:63789575-63789403:2;2675/chr1:4371:chr1:63789575-63789403:1;2676/chr9:3497:
chr9:139716502-139716342:2;2677/chr9:3497:chr9:139716502-139716342:1;2678/chr2:4262:chr2:176995166-
176995024:2;2679/chr2:4262:chr2:176995166-176995024:1;2680/chr4:1277:chr4:8873515-8873346:2;2681/chr
4:1277:chr4:8873515-8873346:1;2682/chr9:1715:chr9:126780232-126780103:2;2683/chr9:1715:chr9:12678023
2-126780103:1;2684/chr8:3701:chr8:145104288-145104163:2;2685/chr8:3701:chr8:145104288-145104163:1;2
686/chr10:2898:chr10:106028659-106028486:1;2687/chr22:2727:chr22:50738621-50738496:2;2688/chr22:272
7:chr22:50738621-50738496:1;2689/chr7:4786:chr7:157406423-157406254:1;2690/chr10:4942:chr10:1351933
40-135193215:2;2691/chr10:4942:chr10:135193340-135193215:1;2692/chr17:2175:chr17:43045036-43044861:
1;2693/chr22:34:chr22:17566751-17566576:2;2694/chr22:34:chr22:17566751-17566576:1;2695/chr22:2146:chr
22:48885020-48884883:2;2696/chr22:2146:chr22:48885020-48884883:1;2697/chr10:3443:chr10:124894879-12
4894706:2;2698/chr10:3443:chr10:124894879-124894706:1;2699/chr20:2966:chr20:62272772-62272625:2;270
0/chr1:1974:chr1:10698909-10698748:2;2701/chr1:1974:chr1:10698909-10698748:1;2702/chr12:1858:chr12:10
4609873-104609704:2;2703/chr12:1858:chr12:104609873-104609704:1;2704/chr14:578:chr14:57265030-5726
4866:2;2705/chr14:578:chr14:57265030-57264866:1;2706/chr20:2966:chr20:62272772-62272625:1;2707/chr10:
4898:chr10:135052102-135051929:2;2708/chr10:4898:chr10:135052102-135051929:1;2709/chr13:865:chr13:7
9170284-79170114:2;2710/chr13:865:chr13:79170284-79170114:1;2711/chr8:1716:chr8:54789950-54789795:2;
2712/chr8:1716:chr8:54789950-54789795:1;2713/chr9:1173:chr9:98981719-98981552:2;2714/chr9:1173:chr9:
98981719-98981552:1;2715/chr3:2880:chr3:156544188-156544017:2;2716/chr3:2880:chr3:156544188-156544
017:1;2717/chr17:4148:chr17:77814525-77814362:2;2718/chr17:4148:chr17:77814525-77814362:1;2719/chr15:
203:chr15:27018478-27018349:2;2720/chr15:203:chr15:27018478-27018349:1;2721/chr5:2560:chr5:14087212
7-140871960:2;2722/chr5:2560:chr5:140872127-140871960:1;2723/chr2:5386:chr2:239072749-239072583:2;2
724/chr2:5386:chr2:239072749-239072583:1;2725/chr2:4451:chr2:200328795-200328620:2;2726/chr2:4451:ch
r2:200328795-200328620:1;2727/chr10:4270:chr10:133110422-133110289:2;2728/chr10:4270:chr10:13311042
2-133110289:1;2729/chr17:537:chr17:4804494-4804320:2;2730/chr17:537:chr17:4804494-4804320:1;2731/chr
4:1270:chr4:8863083-8862930:2;2732/chr3:1095:chr3:47051232-47051073:2;2733/chr3:1095:chr3:47051232-4
7051073:1;2734/chr18:431:chr18:19751703-19751533:2;2735/chr18:431:chr18:19751703-19751533:1;2736/chr
14:2727:chr14:105714683-105714520:2;2737/chr14:2727:chr14:105714683-105714520:1;2738/chr10:2698:chr
10:102586654-102586485:2;2739/chr10:2698:chr10:102586654-102586485:1;2740/chr4:1270:chr4:8863083-88
62930:1;2741/chr16:4179:chr16:88600968-88600831:2;2742/chr16:4179:chr16:88600968-88600831:1;2743/chr
8:13:chr8:494614-494452:2;2744/chr8:13:chr8:494614-494452:1;2745/chr16:4071:chr16:88443212-88443081:2;
2746/chr16:4071:chr16:88443212-88443081:1;2747/chr15:1556:chr15:76638940-76638814:2;2748/chr15:1556:
chr15:76638940-76638814:1;2749/chr22:2205:chr22:48971392-48971255:2;2750/chr22:2205:chr22:48971392-
48971255:1;2751/chr10:950:chr10:26223430-26223266:2;2752/chr10:950:chr10:26223430-26223266:1;2753/c
hr9:3297:chr9:139094816-139094645:2;2754/chr9:3297:chr9:139094816-139094645:1;2755/chr2:2240:chr2:75
147174-75147005:2;2756/chr2:2240:chr2:75147174-75147005:1;2757/chr5:2450:chr5:138729982-138729843:2;
2758/chr13:1076:chr13:100642220-100642086:2;2759/chr13:1076:chr13:100642220-100642086:1;2760/chr4:2
4:chr4:568940-568773:2;2761/chr4:24:chr4:568940-568773:1;2762/chr1:2205:chr1:12123634-12123491:2;2763/
chr1:2205:chr1:12123634-12123491:1;2764/chr14:986:chr14:73958188-73958044:2;2765/chr14:986:chr14:739
58188-73958044:1;2766/cg17300544:chr17:75369111-75368945:2;2767/cg17300544:chr17:75369111-753689
45:1;2768/chr12:428:chr12:6665108-6664937:2;2769/chr8:38:chr8:687589-687464:2;2770/chr8:38:chr8:687589-
687464:1;2771/chr9:631:chr9:79638047-79637875:2;2772/chr9:631:chr9:79638047-79637875:1;2773/chr10:24
07:chr10:94451766-94451592:2;2774/chr10:2407:chr10:94451766-94451592:1;2775/chr16:2386:chr16:511855
72-51185406:2;2776/chr16:2386:chr16:51185572-51185406:1;2777/chr19:367:chr19:1468844-1468700:2;2778/
chr19:367:chr19:1468844-1468700:1;2779/chr16:234:chr16:1035246-1035107:2;2780/chr16:234:chr16:103524
6-1035107:1;2781/chr5:2450:chr5:138729982-138729843:1;2782/chr11:389:chr11:1578344-1578214:2;2783/ch
r11:389:chr11:1578344-1578214:1;2784/chr1:3957:chr1:47904779-47904638:2;2785/chr1:3957:chr1:47904779-
47904638:1;2786/chr16:110:chr16:744266-744099:2;2787/chr16:110:chr16:744266-744099:1;2788/chr17:1606:
chr17:30244359-30244184:2;2789/chr17:1606:chr17:30244359-30244184:1;2790/chr5:2729:chr5:149546999-1
49546827:2;2791/chr5:2729:chr5:149546999-149546827:1;2792/chr19:452:chr19:1762666-1762493:2;2793/chr
19:452:chr19:1762666-1762493:1;2794/chr9:1708:chr9:126778026-126777897:1;2795/chr7:1377:chr7:2328762
8-23287486:2;2796/chr7:1377:chr7:23287628-23287486:1;2797/chr2:1550:chr2:42328826-42328653:2;2798/ch
r2:1550:chr2:42328826-42328653:1;2799/chr2:3925:chr2:154729086-154728912:2;2800/chr2:3925:chr2:15472
9086-154728912:1;2801/chr22:1367:chr22:42679830-42679656:2;2802/chr22:1367:chr22:42679830-42679656:
1;2803/chr2:2227:chr2:74743505-74743333:2;2804/chr2:2227:chr2:74743505-74743333:1;2805/chr2:2750:chr2:
105459706-105459542:2;2806/chr2:2750:chr2:105459706-105459542:1;2807/chr16:375:chr16:1203225-12031
00:2;2808/chr16:375:chr16:1203225-1203100:1;2809/chr17:1078:chr17:12877677-12877539:2;2810/chr17:107
8:chr17:12877677-12877539:1;2811/chr3:394:chr3:13324791-13324621:2;2812/chr3:394:chr3:13324791-13324
621:1;2813/chr5:3133:chr5:170878110-170877975:2;2814/chr5:3133:chr5:170878110-170877975:1;2815/chr7:
405:chr7:1276434-1276303:2;2816/chr7:405:chr7:1276434-1276303:1;2817/chr20:1816:chr20:55206152-55206
015:2;2818/chr20:1816:chr20:55206152-55206015:1;2819/chr17:965:chr17:10102204-10102079:2;2820/chr17:
965:chr17:10102204-10102079:1;2821/chr10:2022:chr10:77155991-77155834:2;2822/chr10:2022:chr10:77155
991-77155834:1;2823/chr10:4581:chr10:134598258-134598089:2;2824/chr10:4581:chr10:134598258-1345980
89:1;2825/chr13:401:chr13:29394321-29394149:2;2826/chr13:401:chr13:29394321-29394149:1;2827/chr8:100
6:chr8:22408833-22408672:2;2828/chr8:1006:chr8:22408833-22408672:1;2829/chr9:55:chr9:1045795-1045621:
1;2830/chr22:1921:chr22:46932455-46932290:1;2831/chr11:3716:chr11:101454561-101454393:2;2832/chr11:
937:chr11:2871857-2871682:2;2833/chr11:937:chr11:2871857-2871682:1;2834/chr5:91:chr5:528659-528501:2;
2835/chr5:91:chr5:528659-528501:1;2836/chr11:3716:chr11:101454561-101454393:1;2837/chr5:1864:chr5:802
56353-80256211:2;2838/chr5:1864:chr5:80256353-80256211:1;2839/chr7:562:chr7:1626073-1625900:2;2840/c
hr7:562:chr7:1626073-1625900:1;2841/chr1:222:chr1:1475323-1475176:2;2842/chr1:222:chr1:1475323-14751
76:1;2843/chr22:2205:chr22:48971239-48971108:2;2844/chr22:2205:chr22:48971239-48971108:1;2845/chr20:
1878:chr20:55965620-55965464:1;2846/chr12:1757:chr12:95942371-95942241:2;2847/chr12:1757:chr12:9594
2371-95942241:1;2848/chr8:650:chr8:10587774-10587649:2;2849/chr8:650:chr8:10587774-10587649:1;2850/c
hr16:393:chr16:1211002-1210828:1;2851/chr8:3309:chr8:143545744-143545576:1;2852/chr10:4269:chr10:133
109593-133109429:2;2853/chr10:4269:chr10:133109593-133109429:1;2854/chrX:537:chrX:25020769-2502059
6:2;2855/chrX:537:chrX:25020769-25020596:1;2856/chr22:2205:chr22:48971617-48971472:2;2857/chr22:2205:
chr22:48971617-48971472:1;2858/chr5:2942:chr5:159399401-159399233:2;2859/chr5:2942:chr5:159399401-1
59399233:1;2860/chr18:1140:chr18:67068423-67068255:2;2861/chr18:1140:chr18:67068423-67068255:1;2862/
chr10:3746:chr10:129537074-129536938:2;2863/chr10:3746:chr10:129537074-129536938:1;2864/chr11:2301:
chr11:63767899-63767753:2;2865/chr11:2301:chr11:63767899-63767753:1;2866/chr1:1852:chr1:8277493-827
7353:2;2867/chr1:1852:chr1:8277493-8277353:1;2868/chr15:1842:chr15:84323046-84322896:2;2869/chr15:18
42:chr15:84323046-84322896:1;2870/chr12:1322:chr12:54441309-54441134:2;2871/chr18:487:chr18:2292984
4-22929696:1;2872/chr7:1085:chr7:49233314923169:2;2873/chr7:1085:chr7:49233314923169:1;2874/chr10:2
949:chr10:108924567-108924400:1;2875/chr19:1881:chr19:15580502-15580347:2;2876/chr19:1881:chr19:155
80502-15580347:1;2877/chr7:4544:chr7:155595962-155595836:2;2878/chr7:4544:chr7:155595962-155595836:
1;2879/chr8:1101:chr8:23584583-23584456:2;2880/chr8:1101:chr8:23584583-23584456:1;2881/chr16:241:chr1
6:1041428-1041270:2;2882/chr16:241:chr16:1041428-1041270:1;2883/chr2:2240:chr2:75147237-75147063:2;2
884/chr2:2240:chr2:75147237-75147063:1;2885/chr7:3616:chr7:130418792-130418660:2;2886/chr7:3616:chr7:
130418792-130418660:1;2887/chr18:891:chr18:4779475747794617:2;2888/chr18:891:chr18:4779475747794
617:1;2889/chr8:2051:chr8:80804177-80804024:1;2890/chr5:2253:chr5:132159004-132158842:2;2891/chr5:22
53:chr5:132159004-132158842:1;2892/chr12:1322:chr12:54441309-54441134:1;2893/chr4:2610:chr4:1556652
05-155665030:2;2894/chr4:2610:chr4:155665205-155665030:1;2895/chr15:2502:chr15:101514058-101513916:
2;2896/chr15:2502:chr15:101514058-101513916:1;2897/chr18:966:chr18:53447556-53447382:2;2898/chr18:96
6:chr18:53447556-53447382:1;2899/chr14:2327:chr14:104622032-104621858:2;2900/chr14:2327:chr14:10462
2032-104621858:1;2901/chr13:1471:chr13:112758838-112758663:2;2902/chr13:1471:chr13:112758838-11275
8663:1;2903/chr8:38:chr8:687325-687194:2;2904/chr8:38:chr8:687325-687194:1;2905/chr16:2445:chr16:54324
557-54324430:1;2906/chr5:830:chr5:3596431-3596260:2;2907/chr5:830:chr5:3596431-3596260:1;2908/chr14:2
099:chr14:102172468-102172295:2;2909/chr14:2099:chr14:102172468-102172295:1;2910/chr14:2833:chr14:1
06320742-106320572:1;2911/chr11:2506:chr11:65408750-65408579:1;2912/chr17:3474:chr17:73584759-7358
4589:1;2913/chr18:1613:chr18:76740998-76740823:2;2914/chr18:1613:chr18:76740998-76740823:1;2915/chr4:
1747:chr4:48485614-48485443:2;2916/chr4:1747:chr4:48485614-48485443:1;2917/chr8:2251:chr8:99986089-
99985945:2;2918/chr8:2251:chr8:99986089-99985945:1;2919/chr17:1933:chr17:38334321-38334151:1;2920/c
hr13:1687:chr13:113699564-113699389:1;2921/chr12:1613:chr12:72666105-72665937:2;2922/chr15:1556:chr1
5:76638648-76638475:1;2923/chr12:1613:chr12:72666105-72665937:1;2924/chr19:550:chr19:2250948-225081
5:2;2925/chr19:550:chr19:2250948-2250815:1;2926/chr13:236:chr13:25320287-25320147:2;2927/chr13:236:ch
r13:25320287-25320147:1;2928/chr17:176:chr17:1173964-1173804:2;2929/chr17:176:chr17:1173964-1173804:
1;2930/chr22:161:chr22:19711392-19711223:1;2931/chr17:4140:chr17:77789918-77789750:2;2932/chr17:414
0:chr17:77789918-77789750:1;2933/chr2:1376:chr2:29033996-29033861:2;2934/chr2:1376:chr2:29033996-290
33861:1;2935/chr10:2308:chr10:88123432-88123257:2;2936/chr10:2308:chr10:88123432-88123257:1;2937/chr
12:3619:chr12:133485057-133484892:2;2938/chr12:3619:chr12:133485057-133484892:1;2939/chr22:2149:chr
22:4888617548886001:2;2940/chr22:2149:chr22:4888617548886001:1;2941/chrX:396:chrX:12156996-12156
849:1;2942/chr14:2833:chr14:106320894-106320722:1;2943/chr14:1314:chr14:90528870-90528732:2;2944/chr
14:1314:chr14:90528870-90528732:1;2945/chr17:3421:chr17:73073968-73073797:2;2946/chr17:3421:chr17:73
073968-73073797:1;2947/chr6:95:chr6:1379007-1378882:2;2948/chr6:95:chr6:1379007-1378882:1;2949/chr4:2
05:chr4:1400150-1399979:2;2950/chr4:205:chr4:1400150-1399979:1;2951/chr3:9:chr3:240192-240027:2;2952/
chr3:9:chr3:240192-240027:1;2953/chr16:234:chr16:1035536-1035395:1;2954/chr11:3716:chr11:101454331-10
1454156:2;2955/chr11:3716:chr11:101454331-101454156:1;2956/chr1:1191:chr1:3460405-3460237:2;2957/chr1:
1191:chr1:3460405-3460237:1;2958/chr6:2499:chr6:133562585-133562411:2;2959/chr10:808:chr10:1842948
5-18429326:2;2960/chr10:808:chr10:18429485-18429326:1;2961/chr6:2499:chr6:133562585-133562411:1;296
2/chr1:59:chr1:969792-969664:1;2963/chr5:2324:chr5:134364182-134364038:2;2964/chr5:2324:chr5:13436418
2-134364038:1;2965/chr15:982:chr15:60296694-60296550:1;2966/chr2:5386:chr2:239073108-239072982:2;29
67/chr2:5386:chr2:239073108-239072982:1;2968/chr9:1218:chr9:100611190-100611020:2;2969/chr9:1218:chr
9:100611190-100611020:1;2970/chr10:519:chr10:8094175-8094000:2;2971/chr10:519:chr10:8094175-8094000:
1;2972/chr16:2668:chr16:58059026-58058856:2;2973/chr16:2668:chr16:58059026-58058856:1;2974/chr12:51:
chr12:680038-679865:1;2975/chr14:881:chr14:70038850-70038715:2;2976/chr14:881:chr14:70038850-700387
15:1;2977/chr18:1054:chr18:57364312-57364187:2;2978/chr18:1054:chr18:57364312-57364187:1;2979/chr15:
1538:chr15:76630392-76630241:2;2980/chr15:1538:chr15:76630392-76630241:1;2981/chr17:534:chr17:48023
79-4802211:2;2982/chr17:534:chr17:4802379-4802211:1;2983/chr10:1956:chr10:73847147-73846977:2;2984/c
hr10:1956:chr10:73847147-73846977:1;2985/chr10:983:chr10:28034670-28034501:2;2986/chr10:983:chr10:28
034670-28034501:1;2987/chr14:1032:chr14:75078676-75078512:2;2988/chr14:1032:chr14:75078676-7507851
2:1;2989/cg23010538:chr1:190447363-190447191:2;2990/cg23010538:chr1:190447363-190447191:1;2991/chr
16:3215:chr16:77469048-77468873:2;2992/chr16:3215:chr16:77469048-77468873:1;2993/chr20:90:chr20:1784
553-1784408:2;2994/chr20:90:chr20:1784553-1784408:1;2995/chr8:1276:chr8:31498326-31498151:2;2996/chr
8:1276:chr8:31498326-31498151:1;2997/chr9:1878:chr9:129377646-129377494:2;2998/chr9:1878:chr9:129377
646-129377494:1;2999/chr15:937:chr15:58358265-58358124:2;3000/chr15:937:chr15:58358265-58358124:1;3
001/chr7:1581:chr7:27291354-27291188:2;3002/chr7:1581:chr7:27291354-27291188:1;3003/chr2:599:chr2:583
3113-5832943:2;3004/chr2:599:chr2:5833113-5832943:1;3005/chr14:881:chr14:70038726-70038555:2;3006/ch
r14:881:chr14:70038726-70038555:1;3007/chr19:298:chr19:1257045-1256913:1;3008/chr2:4182:chr2:1751999
41-175199771:2;3009/chr2:4182:chr2:175199941-175199771:1;3010/chr1:4372:chr1:63790172-63790002:2;30
11/chr1:4372:chr1:63790172-63790002:1;3012/chr6:279:chr6:6004155-6003980:2;3013/chr4:1750:chr4:484932
58-48493088:2;3014/chr4:241:chr4:1538150-1537977:2;3015/chr2:4187:chr2:175201796-175201640:2;3016/ch
r2:4187:chr2:175201796-175201640:1;3017/chr8:652:chr8:10588501-10588328:2;3018/chr8:652:chr8:1058850
1-10588328:1;3019/chr16:2907:chr16:67687653-67687484:2;3020/chr19:367:chr19:1468705-1468541:2;3021/c
hr19:367:chr19:1468705-1468541:1;3022/chr17:2816:chr17:59488492-59488354:2;3023/chr17:2816:chr17:594
88492-59488354:1;3024/chr16:2907:chr16:67687653-67687484:1;3025/chr12:1118:chr12:52115740-52115566:
2;3026/chr12:1118:chr12:52115740-52115566:1;3027/chr10:4059:chr10:131763726-131763587:2;3028/chr10:4
059:chr10:131763726-131763587:1;3029/chr5:1453:chr5:43397365-43397230:1;3030/chr5:2252:chr5:1321502
64-132150092:2;3031/chr5:2252:chr5:132150264-132150092:1;3032/chr3:2636:chr3:138664513-138664353:2;
3033/chr3:2636:chr3:138664513-138664353:1;3034/chr4:241:chr4:1538150-1537977:1;3035/chr21:1265:chr21:
47062332-47062163:2;3036/chr21:1265:chr21:47062332-47062163:1;3037/chr12:1462:chr12:58131504-58131
379:2;3038/chr12:1462:chr12:58131504-58131379:1;3039/chr14:393:chr14:38067764-38067595:2;3040/chr13:
518:chr13:37005849-37005704:2;3041/chr14:393:chr14:38067764-38067595:1;3042/chr13:518:chr13:3700584
9-37005704:1;3043/chr19:3621:chr19:42703922-42703777:2;3044/chr19:3621:chr19:42703922-42703777:1;30
45/chr15:260:chr15:28342442-28342269:2;3046/chr15:260:chr15:28342442-28342269:1;3047/chr12:2587:chr1
2:122016525-122016355:2;3048/chr12:2587:chr12:122016525-122016355:1;3049/chr5:2364:chr5:134871264-1
34871096:2;3050/chr5:2364:chr5:134871264-134871096:1;3051/chr5:3695:chr5:178422173-178422004:2;3052/
chr5:3695:chr5:178422173-178422004:1;3053/chr10:3445:chr10:124896574-124896438:2;3054/chr10:3445:ch
r10:124896574-124896438:1;3055/chr6:2384:chr6:117086979-117086804:2;3056/chr6:2384:chr6:117086979-1
17086804:1;3057/chr9:3295:chr9:139093813-139093640:2;3058/chr9:3295:chr9:139093813-139093640:1;3059/
chr12:1125:chr12:52215699-52215572:2;3060/chr12:1125:chr12:52215699-52215572:1;3061/chr1:5568:chr1:1
61008866-161008691:2;3062/chr4:1702:chr4:42153805-42153630:2;3063/chr4:1702:chr4:42153805-42153630:
1;3064/chr20:555:chr20:21503212-21503077:2;3065/chr20:555:chr20:21503212-21503077:1;3066/chr1:5568:c
hr1:161008866-161008691:1;3067/chr17:2514:chr17:48195201-48195027:2;3068/chr17:4566:chr17:79919700-
79919530:2;3069/chr17:4566:chr17:79919700-79919530:1;3070/chr17:2514:chr17:48195201-48195027:1;3071/
chr6:279:chr6:6004155-6003980:1;3072/chr4:1750:chr4:48493258-48493088:1;3073/chr15:219:chr15:2721669
3-27216557:2;3074/chr15:219:chr15:27216693-27216557:1;3075/chr4:2712:chr4:174428287-174428160:2;307
6/chr4:2712:chr4:174428287-174428160:1;3077/chr5:2246:chr5:132083549-132083377:2;3078/chr5:2246:chr5:
132083549-132083377:1;3079/chr10:2403:chr10:94450388-94450228:2;3080/chr10:2403:chr10:94450388-944
50228:1;3081/chr12:1296:chr12:54355355-54355224:2;3082/chr12:1296:chr12:54355355-54355224:1;3083/chr
10:2898:chr10:106028855-106028729:2;3084/chr10:2898:chr10:106028855-106028729:1;3085/chr3:2385:chr3:
128212350-128212177:2;3086/chr3:2385:chr3:128212350-128212177:1;3087/chr22:2759:chr22:50982929-509
82766:2;3088/chr22:2759:chr22:50982929-50982766:1;3089/chr19:3205:chr19:38042361-38042192:2;3090/chr
19:3205:chr19:38042361-38042192:1;3091/chr12:1457:chr12:58120333-58120208:2;3092/chr12:1457:chr12:58
120333-58120208:1;3093/chr7:1887:chr7:38670958-38670811:2;3094/chr7:1887:chr7:38670958-38670811:1;3
095/chr14:2041:chr14:101925149-101924999:2;3096/chr14:2041:chr14:101925149-101924999:1;3097/chr4:12
90:chr4:8895902-8895748:2;3098/chr4:1290:chr4:8895902-8895748:1;3099/chr14:688:chr14:61747361-617472
36:2;3100/chr14:688:chr14:61747361-61747236:1;3101/chr1:6573:chr1:217313129-217312955:1;3102/chr1:31
96:chr1:29101991-29101819:2;3103/chr1:3196:chr1:29101991-29101819:1;3104/chr2:4079:chr2:171570306-17
1570131:2;3105/chr2:4451:chr2:200328937-200328764:2;3106/chr5:511:chr5:1886181-1886013:2;3107/chr5:5
11:chr5:1886181-1886013:1;3108/chr9:629:chr9:79635846-79635721:2;3109/chr2:2224:chr2:74742325-747421
51:2;3110/chr1:253:chr1:1566083-1565912:2;3111/chr1:253:chr1:1566083-1565912:1;3112/chr9:1770:chr9:127
265719-127265594:2:3113/chr13:100:chr13:21296430-21296299:2;3114/chr13:100:chr13:21296430-21296299:
1;3115/chr13:708:chr13:53420276-53420109:2;3116/chr13:708:chr13:53420276-53420109:1;3117/chr2:2224:c
hr2:74742325-74742151:1;3118/chr9:1770:chr9:127265719-127265594:1;3119/chr6:2386:chr6:117198346-117
198180:2;3120/chr6:2386:chr6:117198346-117198180:1;3121/chr22:2764:chr22:50987137-50987002:2;3122/c
hr22:2764:chr22:50987137-50987002:1;3123/chr17:3789:chr17:76127596-76127460:2;3124/chr17:3789:chr17:
76127596-76127460:1;3125/chr22:2526:chr22:49969447-49969308:1;3126/chr21:1182:chr21:46847923-46847
798:2;3127/chr21:1182:chr21:46847923-46847798:1;3128/chr9:3185:chr9:138674930-138674795:2;3129/chr9:
3185:chr9:138674930-138674795:1;3130/chr22:2791:chr22:51135727-51135569:2;3131/chr22:2791:chr22:511
35727-51135569:1;3132/chr15:1843:chr15:84323496-84323323:2;3133/chr15:1843:chr15:84323496-84323323:
1;3134/chr11:4166:chr11:119211303-119211174:2;3135/chr11:4166:chr11:119211303-119211174:1;3136/chr8:
1696:chr8:53853072-53852897:2;3137/chr20:925:chr20:32255805-32255632:2;3138/chr20:925:chr20:3225580
5-32255632:1;3139/chr1:5019:chr1:119527248-119527074:2;3140/chr1:5019:chr1:119527248-119527074:1;31
41/chr3:3168:chr3:184301987-184301858:2;3142/chr3:3168:chr3:184301987-184301858:1;3143/cg21187769:c
hr4:93226640-93226467:2;3144/chr4:616:chr4:3734376-3734207:1;3145/chr11:4166:chr11:119211415-119211
262:2;3146/chr11:4166:chr11:119211415-119211262:1;3147/cg21187769:chr4:93226640-93226467:1;3148/chr
7:4153:chr7:150812832-150812659:2;3149/chr7:4153:chr7:150812832-150812659:1;3150/chr2:5245:chr2:2370
81933-237081785:2;3151/chr2:5245:chr2:237081933-237081785:1;3152/chr17:1256:chr17:17713674-1771350
4:2;3153/chr17:1256:chr17:17713674-17713504:1;3154/chr21:333:chr21:38081461-38081332:2;3155/chr21:33
3:chr21:38081461-38081332:1;3156/chr8:1696:chr8:53853072-53852897:1;3157/chrX:666:chrX:39865130-398
65005:2;3158/chrX:666:chrX:39865130-39865005:1;3159/chr4:1277:chr4:8873370-8873236:2;3160/chr4:1277:
chr4:8873370-8873236:1;3161/chr8:1695:chr8:53852447-53852282:2;3162/chr8:1695:chr8:53852447-5385228
2:1;3163/chr11:2279:chr11:63530454-63530313:2;3164/chr11:2279:chr11:63530454-63530313:1;3165/chr16:4
109:chr16:88496998-88496825:2;3166/chr16:4109:chr16:88496998-88496825:1;3167/chr2:4079:chr2:1715703
06-171570131:1;3168/chr2:4451:chr2:200328937-200328764:1;3169/chr6:2396:chr6:117869420-117869252:2;
3170/chr6:2396:chr6:117869420-117869252:1;3171/chr12:2942:chr12:128752143-128751971:2;3172/chr12:29
42:chr12:128752143-128751971:1;3173/chr9:629:chr9:79635846-79635721:1;3174/chr22:2774:chr22:5104289
1-51042718:2;3175/chr22:2774:chr22:51042891-51042718:1;3176/chr19:3827:chr19:46387963-46387790:2;31
77/chr19:3827:chr19:46387963-46387790:1;3178/chr22:2727:chr22:50738414-50738269:2;3179/chr22:2727:ch
r22:50738414-50738269:1;3180/chr11:2492:chr11:65314060-65313924:2;3181/chr11:2492:chr11:65314060-65
313924:1;3182/chr15:1843:chr15:84323323-84323148:1;3183/chr1:3957:chr1:47905472-47905343:2;3184/chr1:
3957:chr1:47905472-47905343:1;3185/chr10:2795:chr10:103539289-103539116:2;3186/chr10:2795:chr10:103
539289-103539116:1;3187/chr10:3746:chr10:129537390-129537215:2;3188/chr10:3746:chr10:129537390-129
537215:1;3189/chr13:45:chr13:20176421-20176252:2;3190/chr13:45:chr13:20176421-20176252:1;3191/chr4:1
479:chr4:20255532-20255360:2;3192/chr4:1479:chr4:20255532-20255360:1;3193/chr10:2605:chr10:10128211
6-101281941:2;3194/chr10:2605:chr10:101282116-101281941:1;3195/chr12:1427:chr12:57619134-57618961:2;
3196/chr12:1427:chr12:57619134-57618961:1;3197/chr7:874:chr7:3341572-3341409:2;3198/chr7:874:chr7:33
41572-3341409:1;3199/chr17:2925:chr17:62775270-62775100:2;3200/chr17:2925:chr17:62775270-62775100:1;
3201/chr3:2383:chr3:128211497-128211324:2;3202/chr3:2383:chr3:128211497-128211324:1;3203/chr13:1076:
chr13:100641905-100641731:1;3204/chr16:2474:chr16:54970525-54970351:2;3205/chr16:2474:chr16:549705
25-54970351:1;3206/chr1:4566:chr1:86622710-86622548:2;3207/chr1:4566:chr1:86622710-86622548:1;3208/c
hr1:3867:chr1:45083143-45082977:2;3209/chr1:3867:chr1:45083143-45082977:1;3210/chr22:1823:chr22:4636
8564-46368397:2;3211/chr22:1823:chr22:46368564-46368397:1;3212/chr2:2322:chr2:85361686-85361514:2;3
213/chr2:2322:chr2:85361686-85361514:1;3214/chr7:4146:chr7:150778859-150778685:2;3215/chr7:4146:chr7:
150778859-150778685:1;3216/chr14:1435:chr14:93154502-93154356:2;3217/chr14:1435:chr14:93154502-931
54356:1;3218/chr12:1447:chr12:58013562-58013407:2;3219/chr12:1447:chr12:58013562-58013407:1;3220/chr
8:1752:chr8:56015131-56014961:2;3221/chr8:1752:chr8:56015131-56014961:1;3222/chr11:2460:chr11:648151
61-64814993:2;3223/chr11:2460:chr11:64815161-64814993:1;3224/chr14:125:chr14:24045639-24045464:2;32
25/chr14:125:chr14:24045639-24045464:1;3226/chr10:2140:chr10:81003487-81003359:2;3227/chr10:2140:chr
10:81003487-81003359:1;3228/chr5:2932:chr5:158737763-158737588:2;3229/chr5:2932:chr5:158737763-1587
37588:1;3230/chr6:2396:chr6:117869606-117869463:2;3231/chr6:2396:chr6:117869606-117869463:1;3232/chr
3:2518:chr3:133393546-133393397:2;3233/chr3:2518:chr3:133393546-133393397:1;3234/chr22:1842:chr22:46
460493-46460322:1;3235/chr2:5038:chr2:233285594-233285465:2;3236/chr2:5038:chr2:233285594-23328546
5:1;3237/chr5:1812:chr5:77147813-77147685:2;3238/chr5:1812:chr5:77147813-77147685:1;3239/cg20680720:
chr19:37407310-37407182:1;3240/chr8:1876:chr8:65282266-65282139:2;3241/chr8:1876:chr8:65282266-6528
2139:1;3242/chr20:534:chr20:21491711-21491581:2;3243/chr20:534:chr20:21491711-21491581:1;3244/chr3:2
770:chr3:147128194-147128051:2;3245/chr3:2770:chi3:147128194-147128051:1;3246/chr1:4300:chr1:590419
21-59041785:2;3247/chr1:4300:chr1:59041921-59041785:1;3248/chr14:987:chr14:73958627-73958453:1;3249/
chr14:164:chr14:24804272-24804118:2;3250/chr14:164:chr14:24804272-24804118:1;3251/chr7:4153:chr7:150
812911-150812783:2;3252/chr7:4153:chr7:150812911-150812783:1;3253/chr14:530:chr14:54421848-5442167
7:1;3254/chr3:2385:chr3:128212063-128211910:2;3255/chr3:2385:chr3:128212063-128211910:1;3256/chr7:37
63:chr7:139168180-139168029:2;3257/chr7:3763:chr7:139168180-139168029:1;3258/chr8:1006:chr8:2240908
8-22408941:2;3259/chr4:2250:chr4:111542474-111542319:2;3260/chr4:2250:chr4:111542474-111542319:1;32
61/chr8:1006:chr8:22409088-22408941:1;3262/chr19:369:chr19:1470170-1470019:2;3263/chr19:369:chr19:147
0170-1470019:1;3264/chr18:1140:chr18:67068177-67068018:2;3265/chr18:1140:chr18:67068177-67068018:1;
3266/chr1:3004:chr1:25257033-25256864:2;3267/chr1:3004:chr1:25257033-25256864:1;3268/chr5:705:chr5:27
51518-2751393:2;3269/chr5:705:chr5:2751518-2751393:1;3270/chr8:1971:chr8:72459870-72459707:2;3271/ch
r8:1971:chr8:72459870-72459707:1;3272/chr18:1360:chr18:74962504-74962343:2;3273/chr18:1360:chr18:749
62504-74962343:1;3274/chr1:3435:chr1:34642634-34642473:2;3275/chr1:3435:chr1:34642634-34642473:1;32
76/cg21900495:chr13:28498250-28498077:1;3277/chr11:3841:chr11:112834245-112834087:2;3278/chr11:384
1:chr11:112834245-112834087:1;3279/chr10:2140:chr10:81003767-81003594:2;3280/chr10:2140:chr10:81003
767-81003594:1;3281/chr4:2398:chr4:135122725-135122590:2;3282/chr4:2398:chr4:135122725-135122590:1;
3283/chr2:2164:chr2:73147930-73147765:2;3284/chr2:2164:chr2:73147930-73147765:1;3285/chr3:2471:chr3:1
29694024-129693888:2;3286/chr3:2471:chr3:129694024-129693888:1;3287/chr1:7109:chr1:234040716-23404
0556:2;3288/chr1:7109:chr1:234040716-234040556:1;3289/chr11:3664:chr11:94277863-94277697:2;3290/chr6:
3360:chr6:168502655-168502481:2;3291/chr6:3360:chr6:168502655-168502481:1;3292/chr18:1835:chr18:775
48266-77548141:2;3293/chr18:1835:chr18:77548266-77548141:1;3294/chr11:3664:chr11:94277863-94277697:
1;3295/chr10:2676:chr10:102507768-102507609:2;3296/chr10:2676:chr10:102507768-102507609:1;3297/chr2
0:765:chr20:26190013-26189871:2;3298/chr20:765:chr20:26190013-26189871:1;3299/chr22:826:chr22:334544
25-33454255:2;3300/chr22:826:chr22:33454425-33454255:1;3301/chr5:2942:chr5:159399240-159399100:2;33
02/chr5:2942:chr5:159399240-159399100:1;3303/chr6:2232:chr6:107956201-107956055:2;3304/chr6:2232:chr
6:107956201-107956055:1;3305/chr13:1108:chr13:102569333-102569165:2;3306/chr13:1108:chr13:10256933
3-102569165:1;3307/chr15:937:chr15:58358555-58358414:2;3308/chr15:937:chr15:58358555-58358414:1;330
9/chr18:566:chr18:31020775-31020616:2;3310/chr18:566:chr18:31020775-31020616:1;3311/chr9:3509:chr9:13
9741333-139741192:2;3312/chr9:3509:chr9:139741333-139741192:1;3313/chr7:3100:chr7:99769560-9976939
2:2;3314/chr7:3100:chr7:99769560-99769392:1;3315/chr16:756:chr16:3016875-3016750:2;3316/cg19991022:c
hr20:53092034-53091870:2;3317/chr5:839:chr5:3602730-3602602:2;3318/chr5:839:chr5:3602730-3602602:1;3
319/chr4:2712:chr4:174428018-174427891:2;3320/chr4:2712:chr4:174428018-174427891:1;3321/chr16:756:ch
r16:3016875-3016750:1;3322/cg19991022:chr20:53092034-53091870:1;3323/chr6:1147:chr6:33245572-33245
407:2;3324/chr6:1147:chr6:33245572-33245407:1;3325/chr13:341:chr13:28498359-28498188:2;3326/chr13:34
1:chr13:28498359-28498188:1;3327/chr17:1855:chr17:36667075-36666950:2;3328/chr17:1855:chr17:3666707
5-36666950:1;3329/chr14:411:chr14:38724651-38724486:2;3330/chr14:411:chr14:38724651-38724486:1;3331/
chr7:2146:chr7:49815018-49814847:2;3332/chr7:2146:chr7:49815018-49814847:1;3333/chr8:1971:chr8:72460
256-72460113:1;3334/chr7:562:chr7:1626476-1626339:1;3335/chr8:565:chr8:8559923-8559770:2;3336/chr2:41
91:chr2:175205500-175205375:2;3337/chr2:4191:chr2:175205500-175205375:1;3338/cg06825142:chr11:6372
31-637068:2;3339/cg00556112:chr11:637231-637068:2;3340/cg12928379:chr11:637231-637068:2;3341/cg068
25142:chr11:637231-637068:1;3342/cg00556112:chr11:637231-637068:1;3343/cg12928379:chr11:637231-637
068:1;3344/chr8:565:chr8:8559923-8559770:1;3345/chr2:3847:chr2:145282046-145281888:2;3346/chr2:3847:c
hr2:145282046-145281888:1;3347/chr6:1289:chr6:35109233-35109059:2;3348/chr6:1289:chr6:35109233-3510
9059:1;3349/chr2:1263:chr2:26407764-26407601:2;3350/chr2:1263:chr2:26407764-26407601:1;3351/chr11:55
0:chr11:1995573-1995413:2;3352/chr11:550:chr11:1995573-1995413:1;3353/chr8:3689:chr8:145052201-14505
2039:2;3354/chr8:3689:chr8:145052201-145052039:1;3355/chr20:1878:chr20:55965485-55965360:2;3356/chr2
0:1878:chr20:55965485-55965360:1;3357/chr17:2925:chr17:62775327-62775153:2;3358/chr22:2703:chr22:506
23625-50623499:2;3359/chr22:2703:chr22:50623625-50623499:1;3360/chr8:2963:chr8:142428248-142428073:
2;3361/chr8:2963:chr8:142428248-142428073:1;3362/cg11855526:chr11:30607171-30607011:2;3363/cg11855
526:chr11:30607171-30607011:1;3364/chr6:99:chr6:1384495-1384359:2;3365/chr6:99:chr6:1384495-1384359:
1;3366/chr22:1842:chr22:46460571-46460436:1;3367/cg16629469:chr6:108440719-108440544:2;3368/cg1662
9469:chr6:108440719-108440544:1;3369/chr1:4313:chr1:60280484-60280341:2;3370/chr1:4313:chr1:6028048
4-60280341:1;3371/chr7:3399:chr7:112430452-112430282:2;3372/chr7:3399:chr7:112430452-112430282:1;33
73/chr19:3999:chr19:48947026-48946885:2;3374/chr19:3999:chr19:48947026-48946885:1;3375/chr17:176:chr
17:1174373-1174198:2;3376/chr17:176:chr17:1174373-1174198:1;3377/chr15:1086:chr15:65116415-65116278:
2;3378/chr15:1086:chr15:65116415-65116278:1;3379/chr4:123:chr4:997096-996932:2;3380/chr4:123:chr4:997
096-996932:1;3381/chr17:2925:chr17:62775327-62775153:1;3382/chr14:354:chr14:37128041-37127887:2;338
3/chr14:354:chr14:37128041-37127887:1;3384/chr10:906:chr10:23481148-23481004:2;3385/chr10:906:chr10:2
3481148-23481004:1;3386/chr19:4944:chr19:58908071-58907909:2;3387/chr19:4944:chr19:58908071-589079
09:1;3388/chr1:135:chr1:1118535-1118364:2;3389/chr1:135:chr1:1118535-1118364:1;3390/chr4:1288:chr4:889
5173-8895007:2;3391/chr4:1288:chr4:8895173-8895007:1;3392/chr11:1916:chr11:47416578-47416404:2;3393/
chr11:1916:chr11:47416578-47416404:1;3394/chr16:549:chr16:1583988-1583819:2;3395/chr16:549:chr16:158
3988-1583819:1;3396/chr13:100:chr13:21296040-21295897:2;3397/chr13:100:chr13:21296040-21295897:1;33
98/chr1:3805:chr1:44031917-44031742:2;3399/chr1:3805:chr1:44031917-44031742:1;3400/chr22:162:chr22:19
711747-19711621:2;3401/chr22:162:chr22:19711747-19711621:1;3402/chr3:431:chr3:13590756-13590630:2;3
403/chr3:431:chr3:13590756-13590630:1;3404/chr5:2252:chr5:132149962-132149834:2;3405/chr5:2252:chr5:1
32149962-132149834:1;3406/chr16:1604:chr16:23847181-23847047:2;3407/chr16:1604:chr16:23847181-2384
7047:1;3408/chr16:1299:chr16:12996156-12996019:2;3409/chr16:1299:chr16:12996156-12996019:1;3410/chr1
0:2605:chr10:101282156-101281993:2;3411/chr10:2605:chr10:101282156-101281993:1;3412/chr1:5568:chr1:1
61009041-161008866:2;3413/chr1:5568:chr1:161009041-161008866:1;3414/chr4:773:chr4:5894393-5894224:2;
3415/chr4:773:chr4:5894393-5894224:1;3416/chr10:1053:chr10:30025887-30025712:2;3417/chr10:1053:chr10:
30025887-30025712:1;3418/chr9:1705:chr9:126774872-126774706:2;3419/chr9:1705:chr9:126774872-126774
706:1;3420/chr15:2482:chr15:101267771-101267608:2;3421/chr15:2482:chr15:101267771-101267608:1;3422/
chr10:3180:chr10:118899656-118899517:2;3423/chr10:3180:chr10:118899656-118899517:1;3424/chr11:4765:
chr11:131780894-131780749:2;3425/chr11:4765:chr11:131780894-131780749:1;3426/chr14:688:chr14:617472
92-61747130:2;3427/chr14:688:chr14:61747292-61747130:1;3428/chr15:2501:chr15:101513499-101513333:2;
3429/chr15:2501:chr15:101513499-101513333:1;3430/chr16:2161:chr16:49316543-49316374:2;3431/chr16:21
61:chr16:49316543-49316374:1;3432/chr11:2620:chr11:66885446-66885280:2;3433/chr18:610:chr18:3483402
4-34833860:2;3434/chr18:610:chr18:34834024-34833860:1;3435/chr6:245:chr6:4776266-4776119:2;3436/chr6:
245:chr6:4776266-4776119:1;3437/chr14:2206:chr14:103674237-103674071:2;3438/chr1:252:chr1:1565508-15
65333:2;3439/chr14:2206:chr14:103674237-103674071:1;3440/chr1:252:chr1:1565508-1565333:1;3441/chr2:4
252:chr2:176987721-176987565:2;3442/chr2:4252:chr2:176987721-176987565:1;3443/chr14:2727:chr14:1057
14621-105714491:2;3444/chr14:2727:chr14:105714621-105714491:1;3445/chr6:256:chr6:5086691-5086526:2;
3446/chr6:256:chr6:5086691-5086526:1;3447/chr2:1903:chr2:63275646-63275475:2;3448/chr2:1903:chr2:6327
5646-63275475:1;3449/chr13:708:chr13:53420330-53420172:2;3450/chr13:708:chr13:53420330-53420172:1;3
451/chr2:4772:chr2:220313729-220313589:2;3452/chr2:4772:chr2:220313729-220313589:1;3453/chr3:2897:ch
r3:157821338-157821173:2;3454/chr3:2897:chr3:157821338-157821173:1;3455/chr18:75:chr18:4454816-4454
666:2;3456/chr18:75:chr18:4454816-4454666:1;3457/chr16:1666:chr16:25704281-25704106:2;3458/chr16:166
6:chr16:25704281-25704106:1;3459/chr22:1921:chr22:46932700-46932571:2;3460/chr22:1921:chr22:4693270
0-46932571:1;3461/chr9:239:chr9:23821832-23821668:2;3462/chr9:239:chr9:23821832-23821668:1;3463/chr1
0:503:chr10:8076342-8076173:2;3464/chr10:503:chr10:8076342-8076173:1;3465/chr3:220:chr3:10857834-108
57680:1;3466/chr4:1701:chr4:42153533-42153388:2;3467/chr4:1701:chr4:42153533-42153388:1;3468/chr11:2
620:chr11:66885446-66885280:1;3469/chr13:1184:chr13:109793186-109793046:2;3470/chr13:1184:chr13:109
793186-109793046:1;3471/chr19:4874:chr19:58238954-58238790:2;3472/chr19:4874:chr19:58238954-582387
90:1;3473/chr4:2130:chr4:91049064-91048910:2;3474/chr4:2130:chr4:91049064-91048910:1;3475/chr3:392:ch
r3:13324334-13324183:2;3476/chr2:3718:chr2:131797905-131797741:2;3477/chr2:3718:chr2:131797905-1317
97741:1;3478/chr3:392:chr3:13324334-13324183:1;3479/chr8:3702:chr8:145105618-145105455:2;3480/chr8:3
702:chr8:145105618-145105455:1;3481/chr19:3840:chr19:46518488-46518359:2;3482/chr19:3840:chr19:4651
8488-46518359:1;3483/chr2:3999:chr2:162283660-162283508:2;3484/chr2:3999:chr2:162283660-162283508:1;
3485/chr15:2554:chr15:102029807-102029665:2;3486/chr15:2554:chr15:102029807-102029665:1;3487/chr8:3
9:chr8:687766-687635:2;3488/chr8:39:chr8:687766-687635:1;3489/chr4:391:chr4:2042667-2042498:2;3490/chr
4:391:chr4:2042667-2042498:1;3491/chr17:273:chr17:1960077-1959921:2;3492/chr17:273:chr17:1960077-195
9921:1;3493/chr11:99:chr11:637042-636886:2;3494/chr11:99:chr11:637042-636886:1;3495/chr5:838:chr5:3600
908-3600748:2;3496/chr5:838:chr5:3600908-3600748:1;3497/chr21:100:chr21:27945480-27945338:2;3498/chr
21:100:chr21:27945480-27945338:1;3499/chr8:653:chr8:10589111-10588937:1;3500/chr4:5:chr4:107334-1071
82:2;3501/cg03048083:chr17:43339537-43339389:2;3502/cg03048083:chr17:43339537-43339389:1;3503/chr1
6:4109:chr16:88497027-88496899:2;3504/chr16:4109:chr16:88497027-88496899:1;3505/chr4:5:chr4:107334-1
07182:1;3506/chr10:2027:chr10:77159421-77159248:2;3507/chr10:2027:chr10:77159421-77159248:1;3508/chr
7:4539:chr7:155580135-155579998:2;3509/chr7:4539:chr7:155580135-155579998:1;3510/chr10:848:chr10:217
99199-21799041:1;3511/chr19:158:chr19:863092-862967:2;3512/chr19:158:chr19:863092-862967:1;3513/chr1
7:551:chr17:5001082-5000914:2;3514/chr17:551:chr17:5001082-5000914:1;3515/chrX:810:chrX:48685568-486
85417:2;3516/chrX:810:chrX:48685568-48685417:1;3517/chr12:157:chr12:2800967-2800835:2;3518/chr12:157:
chr12:2800967-2800835:1;3519/chr5:1725:chr5:72732498-72732354:2;3520/chr5:1725:chr5:72732498-727323
54:1;3521/chr19:2488:chr19:29285026-29284874:1;3522/chr17:2823:chr17:59529673-59529528:2;3523/chr17:
2823:chr17:59529673-59529528:1;3524/chr4:62:chr4:683039-682887:2;3525/chr4:62:chr4:683039-682887:1;35
26/chr2:4251:chr2:176987386-176987216:2;3527/chr2:4251:chr2:176987386-176987216:1;3528/chr19:4653:ch
r19:55598286-55598119:2;3529/chr19:4653:chr19:55598286-55598119:1;3530/chr17:2810:chr17:59482706-59
482541:2;3531/chr17:2810:chr17:59482706-59482541:1;3532/chr13:498:chr13:36045231-36045095:1;3533/chr
6:1746:chr6:50818289-50818134:1;3534/chr1:6194:chr1:203045133-203044961:2;3535/chr10:2698:chr10:1025
86829-102586659:2;3536/chr10:2698:chr10:102586829-102586659:1;3537/chr12:2984:chr12:129337950-1293
37818:2;3538/chr12:2984:chr12:129337950-129337818:1;3539/chr1:6194:chr1:203045133-203044961:1;3540/
chr2:2215:chr2:74725245-74725077:2;3541/chr2:2215:chr2:74725245-74725077:1;3542/chr2:4132:chr2:17296
5651-172965477:2;3543/chr2:4132:chr2:172965651-172965477:1;3544/chr1:2566:chr1:18434531-18434373:2;
3545/chr1:2566:chr1:18434531-18434373:1;3546/chr17:2750:chr17:56564942-56564787:2;3547/chr17:2750:ch
r17:56564942-56564787:1;3548/chr1:5025:chr1:119532199-119532043:2;3549/chr1:5025:chr1:119532199-119
532043:1;3550/chr3:2753:chr3:147111756-147111581:2;3551/chr3:2753:chr3:147111756-147111581:1;3552/c
hr3:333:chr3:13114910-13114767:2;3553/chr3:333:chr3:13114910-13114767:1;3554/chr9:1705:chr9:12677513
1-126774956:2;3555/chr19:4369:chr19:52552234-52552059:1;3556/chr10:1637:chr10:60937050-60936875:2;3
557/chr10:1637:chr10:60937050-60936875:1;3558/chr6:279:chr6:6003997-6003844:2;3559/chr6:279:chr6:6003
997-6003844:1;3560/chr9:1705:chr9:126775131-126774956:1;3561/chr16:241:chr16:1041040-1040915:2;3562/
chr16:241:chr16:1041040-1040915:1;3563/cg22871668:chr6:133562602-133562455:2;3564/cg22871668:chr6:
133562602-133562455:1;3565/chr14:1863:chr14:100626301-100626150:2;3566/chr14:1863:chr14:100626301-
100626150:1;3567/chr16:2379:chr16:51168673-51168541:2;3568/chr16:2379:chr16:51168673-51168541:1;356
9/chr12:1460:chr12:58130245-58130113:2;3570/chr12:1797:chr12:99289255-99289086:2;3571/chr12:1797:chr
12:99289255-99289086:1;3572/chr15:2091:chr15:91427854-91427727:2;3573/chr15:2091:chr15:91427854-914
27727:1;3574/chr14:354:chr14:37128234-37128109:2;3575/chr14:354:chr14:37128234-37128109:1;3576/chr2:
4191:chr2:175205614-175205487:2;3577/chr2:4191:chr2:175205614-175205487:1;3578/chr22:2792:chr22:511
36490-51136319:2;3579/chr22:2792:chr22:51136490-51136319:1;3580/chr18:763:chr18:44336707-44336534:2;
3581/chr18:763:chr18:44336707-44336534:1;3582/chr16:4179:chr16:88600853-88600716:2;3583/chr16:4179:
chr16:88600853-88600716:1;3584/chr8:3527:chr8:144358223-144358050:2;3585/chr8:3527:chr8:144358223-1
44358050:1;3586/chr18:1054:chr18:57364205-57364078:2;3587/chr18:1054:chr18:57364205-57364078:1;3588/
chr10:3506:chr10:125651373-125651228:2;3589/chr10:3506:chr10:125651373-125651228:1;3590/chr11:3710:
chr11:100998783-100998652:2;3591/chr11:3710:chr11:100998783-100998652:1;3592/chr1:7249:chr1:2402563
50-240256176:2;3593/chr1:7249:chr1:240256350-240256176:1;3594/chr11:3716:chr11:101454600-101454475:
2;3595/chr11:3716:chr11:101454600-101454475:1;3596/chr19:3999:chr19:48947449-48947313:2;3597/chr19:3
999:chr19:48947449-48947313:1;3598/chr8:96:chr8:877194-877051:2;3599/chr22:1852:chr22:46475997-46475
855:1;3600/chr8:96:chr8:877194-877051:1;3601/chr20:136:chr20:2674423-2674255:2;3602/chr20:136:chr20:26
74423-2674255:1;3603/chr7:735:chr7:2558637-2558467:2;3604/chr3:138:chr3:8810159-8809991:2;3605/chr13:
1468:chr13:112727596-112727432:2;3606/chr13:1468:chr13:112727596-112727432:1;3607/chr3:138:chr3:881
0159-8809991:1;3608/chr7:735:chr7:2558637-2558467:1;3609/chr12:1112:chr12:51718272-51718144:2;3610/c
hr12:1112:chr12:51718272-51718144:1;3611/chr1:5019:chr1:119527190-119527022:2;3612/chr9:1941:chr9:13
0461688-130461516:2;3613/chr9:1941:chr9:130461688-130461516:1;3614/chr5:3644:chr5:178004303-178004
161:2;3615/chr5:3644:chr5:178004303-178004161:1;3616/chrX:678:chrX:39949790-39949617:2;3617/chrX:678:
chrX:39949790-39949617:1;3618/chr14:411:chr14:38724949-38724806:2;3619/chr14:411:chr14:38724949-38
724806:1;3620/chr8:1921:chr8:67873735-67873571:2;3621/chr8:1921:chr8:67873735-67873571:1;3622/chr17:
1855:chr17:36666834-36666676:2;3623/chr17:1855:chr17:36666834-36666676:1;3624/chr8:1018:chr8:224469
18-22446781:1;3625/chr11:5:chr11:280409-280283:2;3626/chr11:5:chr11:280409-280283:1;3627/chr19:368:chr
19:1469851-1469717:2;3628/chr19:368:chr19:1469851-1469717:1;3629/chr7:1788:chr7:35293721-35293575:2;
3630/chr7:1788:chr7:35293721-35293575:1;3631/chr21:666:chr21:44037406-44037274:2;3632/chr21:666:chr2
1:44037406-44037274:1;3633/chr13:289:chr13:26625971-26625841:2;3634/chr13:289:chr13:26625971-266258
41:1;3635/chr9:1083:chr9:96722812-96722641:2;3636/chr9:1083:chr9:96722812-96722641:1;3637/chr7:1491:c
hr7:27153450-27153313:2;3638/chr7:1491:chr7:27153450-27153313:1;3639/chr15:2490:chr15:101390108-101
389933:2;3640/chr15:2490:chr15:101390108-101389933:1;3641/chr2:599:chr2:5833323-5833186:2;3642/chr2:
599:chr2:5833323-5833186:1;3643/chr12:1140:chr12:52301463-52301296:2;3644/chr12:1140:chr12:52301463-
52301296:1;3645/chr19:567:chr19:2291166-2291020:2;3646/chr19:567:chr19:2291166-2291020:1;3647/chr10:
2874:chr10:105344711-105344540:2;3648/chr10:2874:chr10:105344711-105344540:1;3649/chr1:3400:chr1:33
772454-33772282:2;3650/chr1:3400:chr1:33772454-33772282:1;3651/chr19:4653:chr19:55598159-55597989:2;
3652/chr5:1434:chr5:42952505-42952380:2;3653/chr5:1434:chr5:42952505-42952380:1;3654/chr19:4653:chr1
9:55598159-55597989:1;3655/chr10:2424:chr10:94822806-94822638:2;3656/chr10:2424:chr10:94822806-9482
2638:1;3657/chr18:768:chr18:44526816-44526641:1;3658/chr8:1971:chr8:72459926-72459753:2;3659/chr8:19
71:chr8:72459926-72459753:1;3660/cg03853987:chr2:101034388-101034257:2;3661/cg03853987:chr2:10103
4388-101034257:1;3662/chr20:2212:chr20:59828927-59828759:2;3663/chr20:2212:chr20:59828927-59828759:
1;3664/chr11:1916:chr11:47416649-47416519:2;3665/chr11:1916:chr11:47416649-47416519:1;3666/chr9:1956:
chr9:130516636-130516462:2;3667/chr9:1956:chr9:130516636-130516462:1;3668/chr17:2827:chr17:5953215
9-59531988:1;3669/chr7:4153:chr7:150812613-150812439:2;3670/chr6:2263:chr6:108489980-108489805:2;36
71/chr6:2263:chr6:108489980-108489805:1;3672/chr12:1319:chr12:54428065-54427925:2;3673/chr13:368:chr
13:28674422-28674269:2;3674/chr13:368:chr13:28674422-28674269:1;3675/chr6:384:chr6:10385040-1038491
4:2;3676/chr6:384:chr6:10385040-10384914:1;3677/chr17:309:chr17:2627811-2627636:2;3678/chr17:309:chr1
7:2627811-2627636:1;3679/chr13:289:chr13:26626263-26626088:2;3680/cg25664438:chr8:97505677-9750550
7:1;3681/chr4:15:chr4:330804-330668:2;3682/chr17:3473:chr17:73584368-73584202:2;3683/chr6:2396:chr6:11
7869487-117869358:2;3684/chr2:4191:chr2:175205215-175205047:1;3685/chr4:15:chr4:330804-330668:1;368
6/chr19:3503:chr19:41119463-41119326:2;3687/chr19:3503:chr19:41119463-41119326:1;3688/chr5:1949:chr5:
92939934-92939766:2;3689/chr5:1949:chr5:92939934-92939766:1;3690/chr1:5370:chr1:156046859-15604668
8:2;3691/chr7:4303:chr7:152623001-152622834:2;3692/chr22:2727:chr22:50738316-50738160:2;3693/chr14:2
041:chr14:101925249-101925120:2;3694/chr8:766:chr8:12809510-12809352:2;3695/chr8:766:chr8:12809510-1
2809352:1;3696/chr5:2729:chr5:149546940-149546775:2;3697/chr19:1696:chr19:13210644-13210519:2;3698/
chr19:1696:chr19:13210644-13210519:1;3699/chr17:1814:chr17:35300059-35299884:2;3700/chr12:51:chr12:6
79717-679591:2;3701/chr12:51:chr12:679717-679591:1;3702/chr17:1814:chr17:35300059-35299884:1;3703/ch
r4:2130:chr4:91049124-91048951:2;3704/chr4:2130:chr4:91049124-91048951:1;3705/chr10:808:chr10:184293
68-18429242:2;3706/chr10:808:chr10:18429368-18429242:1;3707/chr5:1172:chr5:15500644-15500504:2;3708/
chr5:1172:chr5:15500644-15500504:1;3709/chr4:2716:chr4:174430884-174430709:2;3710/chr4:2716:chr4:174
430884-174430709:1;3711/chr22:2727:chr22:50738316-50738160:1;3712/chr14:2041:chr14:101925249-10192
5120:1;3713/chr5:2729:chr5:149546940-149546775:1;3714/chr14:2140:chr14:103011303-103011133:2;3715/c
hr14:2140:chr14:103011303-103011133:1;3716/chr8:1744:chr8:55383071-55382932:2;3717/chr8:1744:chr8:55
383071-55382932:1;3718/chr4:1403:chr4:13544084-13543909:2;3719/chr4:1403:chr4:13544084-13543909:1;3
720/chr8:1403:chr8:38757800-38757625:2;3721/chr8:1403:chr8:38757800-38757625:1;3722/chr13:1702:chr13:
113764513-113764384:2;3723/chr13:1702:chr13:113764513-113764384:1;3724/chr7:4153:chr7:150812613-15
0812439:1;3725/chr5:514:chr5:1887279-1887153:2;3726/chr5:514:chr5:1887279-1887153:1;3727/chr12:1319:c
hr12:54428065-54427925:1;3728/chr8:1752:chr8:56014904-56014779:2;3729/chr8:1752:chr8:56014904-56014
779:1;3730/chr4:26:chr4:570064-569917:2;3731/chr4:26:chr4:570064-569917:1;3732/chr19:3157:chr19:370962
09-37096036:2;3733/chr19:3157:chr19:37096209-37096036:1;3734/chr8:3703:chr8:145106100-145105933:2;3
735/chr17:3473:chr17:73584368-73584202:1;3736/chr8:3703:chr8:145106100-145105933:1;3737/chr19:4796:c
hr19:56988883-56988716:2;3738/chr19:4796:chr19:56988883-56988716:1;3739/chr14:626:chr14:59931801-59
931629:2;3740/chr14:626:chr14:59931801-59931629:1;3741/chr1:5370:chr1:156046859-156046688:1;3742/chr
7:4303:chr7:152623001-152622834:1;3743/chr12:1282:chr12:54345893-54345719:2;3744/chr12:1282:chr12:54
345893-54345719:1;3745/chr19:918:chr19:4329039-4328904:2;3746/chr19:918:chr19:4329039-4328904:1;374
7/chr12:1614:chr12:72666920-72666747:2;3748/chr12:1614:chr12:72666920-72666747:1;3749/cg12473406:ch
r18:18823061-18822887:1;3750/chr1:3774:chr1:43534042-43533873:2;3751/chr1:3774:chr1:43534042-435338
73:1;3752/chr19:3873:chr19:46996967-46996794:2;3753/chr19:3873:chr19:46996967-46996794:1;3754/chr5:2
048:chr5:112539175-112539000:2;3755/chr22:1852:chr22:46476633-46476508:1;3756/chr16:1850:chr16:2988
8157-29888016:2;3757/chr8:33:chr8:638383-638208:2;3758/chr8:33:chr8:638383-638208:1;3759/chr20:2210:c
hr20:59828390-59828250:2;3760/chr20:2210:chr20:59828390-59828250:1;3761/chr1:5027:chr1:119533119-11
9532994:2;3762/chr1:5027:chr1:119533119-119532994:1;3763/chr17:1256:chr17:17713588-17713415:2;3764/
chr17:1256:chr17:17713588-17713415:1;3765/cg07352438:chr18:5543692-5543517:2;3766/cg07352438:chr18:
5543692-5543517:1;3767/chr16:1850:chr16:29888157-29888016:1;3768/chr10:3131:chr10:118031062-118030
891:2;3769/chr10:3131:chr10:118031062-118030891:1;3770/chr2:3710:chr2:131721958-131721806:2;3771/chr
2:3710:chr2:131721958-131721806:1;3772/chr8:728:chr8:11537877-11537751:2;3773/chr8:728:chr8:11537877-
11537751:1;3774/chr15:1198:chr15:68119312-68119144:2;3775/chr15:1198:chr15:68119312-68119144:1;377
6/cg10292139:chr8:97507685-97507560:1;3777/chr16:3825:chr16:86544989-86544823:2;3778/chr16:3825:chr
16:86544989-86544823:1;3779/chrX:1560:chrX:133684896-133684722:2;3780/chrX:1560:chrX:133684896-133
684722:1;3781/chr6:2142:chr6:100062041-100061876:2;3782/chr6:2142:chr6:100062041-100061876:1;3783/c
hr22:34:chr22:17566830-17566699:2;3784/chr22:34:chr22:17566830-17566699:1;3785/chr7:1422:chr7:258927
04-25892570:2;3786/chr11:2492:chr11:65314498-65314324:2;3787/chr11:2492:chr11:65314498-65314324:1;3
788/chr4:2973:chr4:188916732-188916557:2;3789/chr4:2973:chr4:188916732-188916557:1;3790/chr17:551:ch
r17:5001005-5000870:2;3791/chr17:551:chr17:5001005-5000870:1;3792/chr2:257:chr2:1747266-1747141:2;37
93/chr2:257:chr2:1747266-1747141:1;3794/chr4:202:chr4:1398927-1398756:2;3795/chr4:202:chr4:1398927-13
98756:1;3796/chr3:761:chr3:32859120-32858950:2;3797/chr3:761:chr3:32859120-32858950:1;3798/chr6:2842:
chr6:157558007-157557843:2;3799/chr6:2842:chr6:157558007-157557843:1;3800/chr6:384:chr6:10385214-10
385039:2;3801/chr9:3185:chr9:138675044-138674918:2;3802/chr9:3185:chr9:138675044-138674918:1;3803/c
hr14:323:chr14:36987134-36986989:2;3804/chr14:323:chr14:36987134-36986989:1;3805/chr7:4153:chr7:1508
12120-150811950:2;3806/chr7:4153:chr7:150812120-150811950:1;3807/chr15:1830:chr15:83952243-8395206
8:2;3808/chr15:1830:chr15:83952243-83952068:1;3809/chr8:652:chr8:10588404-10588268:2;3810/chr8:652:ch
r8:10588404-10588268:1;3811/chr17:534:chr17:4802497-4802360:2;3812/chr17:534:chr17:4802497-4802360:
1;3813/chr8:2179:chr8:97157378-97157203:2;3814/chr8:2179:chr8:97157378-97157203:1;3815/chr5:1826:chr5:
77806294-77806157:2;3816/chr5:1826:chr5:77806294-77806157:1;3817/chr2:3000:chr2:110372732-11037259
4:2;3818/chr2:3000:chr2:110372732-110372594:1;3819/chr7:3502:chr7:127672478-127672348:2;3820/chr7:35
02:chr7:127672478-127672348:1;3821/chr14:312:chr14:36973369-36973201:2;3822/chr14:312:chr14:3697336
9-36973201:1;3823/chr8:652:chr8:10588685-10588558:2;3824/chr8:652:chr8:10588685-10588558:1;3825/chr1
0:1133:chr10:35928914-35928762:2;3826/chr10:1133:chr10:35928914-35928762:1;3827/chr13:1060:chr13:100
608303-100608130:2;3828/chr13:1060:chr13:100608303-100608130:1;3829/chr16:825:chr16:3550241-355006
7:2;3830/chr13:561:chr13:43148450-43148276:2;3831/chr13:561:chr13:43148450-43148276:1;3832/chr16:679:
chr16:2286989-2286841:2;3833/chr16:679:chr16:2286989-2286841:1;3834/chr7:1932:chr7:42267824-4226765
2:2;3835/chr7:1932:chr7:42267824-42267652:1;3836/chr8:3527:chr8:144358287-144358122:2;3837/chr8:3527:
chr8:144358287-144358122:1;3838/chr3:161:chr3:9595671-9595499:2;3839/chr3:161:chr3:9595671-9595499:1;
3840/chr10:524:chr10:8098061-8097888:2;3841/chr10:524:chr10:8098061-8097888:1;3842/cg19283506:chr2:
101034382-101034257:2;3843/cg19283506:chr2:101034382-101034257:1;3844/chr12:1797:chr12:99289173-9
9289039:2;3845/chr2:38:chr2:468468-468303:1;3846/chr12:1797:chr12:99289173-99289039:1;3847/chr1:4861:
chr1:111217041-111216875:2;3848/chr1:4861:chr1:111217041-111216875:1;3849/chr2:3916:chr2:154335258-
154335083:2;3850/chr2:3916:chr2:154335258-154335083:1;3851/chr20:2056:chr20:57766664-57766525:2;385
2/chr20:2056:chr20:57766664-57766525:1;3853/chr10:2401:chr10:94449707-94449582:2;3854/chr10:2401:chr
10:94449707-94449582:1;3855/chr1:3209:chr1:29447932-29447791:2;3856/chr1:3209:chr1:29447932-2944779
1:1;3857/chr2:4772:chr2:220313037-220312912:2;3858/chr2:4772:chr2:220313037-220312912:1;3859/chr22:2
526:chr22:49969696-49969522:1;3860/chr4:1288:chr4:8895032-8894859:2;3861/chr12:1757:chr12:95942240-9
5942108:2;3862/chr12:1757:chr12:95942240-95942108:1;3863/chr12:1084:chr12:50297881-50297756:2;3864/
chr12:1084:chr12:50297881-50297756:1;3865/chr11:2488:chr11:65246497-65246336:2;3866/chr11:2488:chr11:
65246497-65246336:1;3867/chr7:2651:chr7:71801371-71801237:2;3868/chr7:2651:chr7:71801371-71801237:
1;3869/chr2:4572:chr2:209271691-209271523:2;3870/chr2:4572:chr2:209271691-209271523:1;3871/chr16:407
1:chr16:88443096-88442965:2;3872/chr16:4071:chr16:88443096-88442965:1;3873/chr22:2722:chr22:5070635
5-50706193:2;3874/chr22:2722:chr22:50706355-50706193:1;3875/chr21:158:chr21:32931512-32931343:2;387
6/chr21:158:chr21:32931512-32931343:1;3877/chr1:4364:chr1:63786045-63785873:2;3878/chr1:4364:chr1:637
86045-63785873:1;3879/chr5:1719:chr5:72678163-72677997:2;3880/chr5:1719:chr5:72678163-72677997:1;38
81/chr10:1053:chr10:30026071-30025937:2;3882/chr14:2099:chr14:102172127-102172000:2;3883/chr14:2099:
chr14:102172127-102172000:1;3884/chr8:13:chr8:494441-494270:2;3885/chr8:13:chr8:494441-494270:1;3886/
chr2:4183:chr2:175200535-175200387:2;3887/chr2:4183:chr2:175200535-175200387:1;3888/chr2:3031:chr2:1
11877174-111877048:2;3889/chr2:3031:chr2:111877174-111877048:1;3890/chr4:158:chr4:1165120-1164952:2;
3891/chr4:158:chr4:1165120-1164952:1;3892/chr12:1319:chr12:54427831-54427662:2;3893/chr12:1319:chr12:
54427831-54427662:1;3894/chr18:1613:chr18:76740551-76740411:2;3895/chr18:1613:chr18:76740551-76740
411:1;3896/chr14:881:chr14:70038453-70038328:2;3897/chr14:881:chr14:70038453-70038328:1;3898/chr9:19
56:chr9:130516899-130516766:2;3899/chr9:1956:chr9:130516899-130516766:1;3900/cg08848774:chr17:4304
7796-43047626:2;3901/cg08848774:chr17:43047796-43047626:1;3902/chr18:1155:chr18:70535128-70534960:
2;3903/chr18:1155:chr18:70535128-70534960:1;3904/chr17:1933:chr17:38334250-38334083:2;3905/chr17:193
3:chr17:38334250-38334083:1;3906/chr12:3052:chr12:130388709-130388536:2;3907/chr12:3052:chr12:13038
8709-130388536:1;3908/chr2:3049:chr2:112939312-112939180:2;3909/chr2:3049:chr2:112939312-112939180:
1;3910/chr17:534:chr17:4802768-4802599:2;3911/chr17:534:chr17:4802768-4802599:1;3912/chr10:1053:chr10:
30026071-30025937:1;3913/chr10:2424:chr10:94823007-94822879:2;3914/chr10:2424:chr10:94823007-94822
879:1;3915/chr1:4313:chr1:60280813-60280643:2;3916/chr1:4313:chr1:60280813-60280643:1;3917/chr10:195
8:chr10:73847967-73847792:2;3918/chr10:1958:chr10:73847967-73847792:1;3919/chr7:4303:chr7:152623305-
152623132:2;3920/chr7:4303:chr7:152623305-152623132:1;3921/chr2:4287:chr2:177043362-177043237:2;392
2/chr2:4287:chr2:177043362-177043237:1;3923/chr2:3447:chr2:127414109-127413935:2;3924/chr15:935:chr1
5:58357378-58357203:2;3925/chr12:1090:chr12:50355661-50355511:2;3926/chr12:1090:chr12:50355661-5035
5511:1;3927/chr5:1789:chr5:76373336-76373170:2;3928/chr5:1789:chr5:76373336-76373170:1;3929/chr10:90
5:chr10:23480939-23480766:2;3930/chr10:905:chr10:23480939-23480766:1;3931/chr8:1405:chr8:38832132-38
831961:2;3932/chr8:1405:chr8:38832132-38831961:1;3933/chr6:2190:chr6:105389450-105389282:2;3934/chr6:
2190:chr6:105389450-105389282:1;3935/chr15:634:chr15:41794989-41794814:2;3936/chr14:881:chr14:70038
575-70038408:2;3937/chr14:881:chr14:70038575-70038408:1;3938/chr13:1173:chr13:109148150-109147976:2;
3939/chr13:1173:chr13:109148150-109147976:1;3940/chr15:634:chr15:41794989-41794814:1;3941/chr15:207:
chr15:27112876-27112725:2;3942/chr15:207:chr15:27112876-27112725:1;3943/chr2:1926:chr2:63287140-632
86966:2;3944/chr7:4818:chr7:157478929-157478804:2;3945/chr2:1926:chr2:63287140-63286966:1;3946/chr7:
4818:chr7:157478929-157478804:1;3947/chr8:1405:chr8:38832285-38832115:2;3948/chr8:1405:chr8:3883228
5-38832115:1;3949/chr14:393:chr14:38067595-38067427:2;3950/chr14:393:chr14:38067595-38067427:1;3951/
chr17:4422:chr17:79315678-79315507:2;3952/chr17:4422:chr17:79315678-79315507:1;3953/chr8:1405:chr8:3
8831964-38831800:2;3954/chr8:1405:chr8:38831964-38831800:1;3955/chr17:1003:chr17:11144167-11144024:
2;3956/chr18:503:chr18:24130728-24130562:1;3957/chr10:4269:chr10:133110014-133109862:2;3958/chr10:42
69:chr10:133110014-133109862:1;3959/chr3:761:chr3:32859021-32858892:2;3960/chr17:658:chr17:6899728-6
899553:2;3961/chr17:658:chr17:6899728-6899553:1;3962/chr3:761:chr3:32859021-32858892:1;3963/chr8:354:
chr8:1950567-1950398:2;3964/chr8:354:chr8:1950567-1950398:1;3965/chr10:3406:chr10:123923312-1239231
45:2;3966/chr10:3406:chr10:123923312-123923145:1;3967/chr16:2924:chr16:68118774-68118605:2;3968/chr1
6:2924:chr16:68118774-68118605:1;3969/chr5:2489:chr5:139228207-139228039:2;3970/chr5:2489:chr5:13922
8207-139228039:1;3971/chr4:2084:chr4:85418790-85418616:2;3972/chr4:2084:chr4:85418790-85418616:1;39
73/chr11:296:chr11:1358628-1358463:2;3974/chr11:296:chr11:1358628-1358463:1;3975/chr16:2668:chr16:580
58788-58058642:2;3976/chr16:2668:chr16:58058788-58058642:1;3977/chr18:585:chr18:32847548-32847403:2;
3978/chr18:585:chr18:32847548-32847403:1;3979/chr8:2113:chr8:91804072-91803904:2;3980/chr8:2113:chr8:
91804072-91803904:1;3981/chr20:924:chr20:32254853-32254720:2;3982/chr20:924:chr20:32254853-3225472
0:1;3983/chr11:98:chr11:627550-627399:2;3984/chr11:98:chr11:627550-627399:1;3985/chrX:537:chrX:250206
43-25020500:2;3986/chrX:537:chrX:25020643-25020500:1;3987/chr9:1188:chr9:99482621-99482456:2;3988/c
hr9:1188:chr9:99482621-99482456:1;3989/chr7:3112:chr7:100091261-100091086:2;3990/chr7:3112:chr7:1000
91261-100091086:1;3991/chr8:3703:chr8:145106353-145106218:2;3992/chr8:3703:chr8:145106353-14510621
8:1;3993/chr15:1830:chr15:83952528-83952400:1;3994/chr10:3406:chr10:123923024-123922851:2;3995/cg06
463958:chr6:166582425-166582252:1;3996/chr18:431:chr18:19751615-19751454:2;3997/chr18:431:chr18:197
51615-19751454:1;3998/chr15:2482:chr15:101268002-101267862:2;3999/chr15:2482:chr15:101268002-10126
7862:1;4000/chr22:1852:chr22:46476495-46476351:2;4001/chr22:1852:chr22:46476495-46476351:1;4002/chr5:
1410:chr5:40682080-40681921:1;4003/chr9:207:chr9:19127574-19127403:2;4004/chr9:207:chr9:19127574-19
127403:1;4005/chr4:1475:chr4:20254251-20254126:2;4006/chr4:1475:chr4:20254251-20254126:1;4007/chr11:
692:chr11:2236920-2236787:1;4008/chr12:1860:chr12:104697560-104697386:2;4009/chr12:1860:chr12:10469
7560-104697386:1;4010/chr2:3074:chr2:114034917-114034742:2;4011/chr2:3049:chr2:112939469-112939295:
2;4012/chr2:3049:chr2:112939469-112939295:1;4013/chr2:3074:chr2:114034917-114034742:1;4014/chr16:247
7:chr16:54971806-54971635:2;4015/chr16:2477:chr16:54971806-54971635:1;4016/chr13:1687:chr13:1136998
98-113699731:2;4017/chr13:1687:chr13:113699898-113699731:1;4018/chr15:1175:chr15:67326173-67326041:
2;4019/chr15:1175:chr15:67326173-67326041:1;4020/chr7:1377:chr7:23287575-23287400:2;4021/chr7:1377:c
hr7:23287575-23287400:1;4022/chr7:1788:chr7:35293516-35293389:2;4023/chr7:1788:chr7:35293516-352933
89:1;4024/chr13:498:chr13:36045534-36045360:2;4025/chr13:498:chr13:36045534-36045360:1;4026/chr2:412
2:chr2:172947969-172947842:2;4027/chr2:4122:chr2:172947969-172947842:1;4028/chr1:4054:chr1:50889086-
50888914:2;4029/chr1:4054:chr1:50889086-50888914:1;4030/chr6:2182:chr6:101850798-101850623:2;4031/c
hr6:2182:chr6:101850798-101850623:1;4032/chr5:2417:chr5:136834315-136834140:2;4033/chr5:2417:chr5:13
6834315-136834140:1;4034/chr12:1757:chr12:95943047-95942874:2;4035/chr12:1757:chr12:95943047-95942
874:1;4036/chr12:1296:chr12:54355324-54355149:2;4037/chr12:1296:chr12:54355324-54355149:1;4038/chr9:
376:chr9:35675764-35675614:2;4039/chr9:376:chr9:35675764-35675614:1;4040/chr14:660:chr14:60981897-60
981742:1;4041/chr19:368:chr19:1469733-1469558:2;4042/chr19:368:chr19:1469733-1469558:1;4043/chr5:192
6:chr5:92906853-92906678:2;4044/chr5:1926:chr5:92906853-92906678:1;4045/chr14:157:chr14:24780178-247
80053:2;4046/chr14:157:chr14:24780178-24780053:1;4047/chr17:1218:chr17:17399342-17399214:2;4048/chr1
7:1218:chr17:17399342-17399214:1;4049/chr4:2332:chr4:122301969-122301809:2;4050/chr4:2332:chr4:12230
1969-122301809:1;4051/cg00662647:chr1:234350127-234349998:2;4052/cg00662647:chr1:234350127-23434
9998:1;4053/chr3:20:chr3:2140840-2140683:2;4054/chr3:20:chr3:2140840-2140683:1;4055/chr2:4451:chr2:200
329102-200328928:2;4056/chr2:4451:chr2:200329102-200328928:1;4057/cg03351460:chr19:19007422-19007
288:2;4058/cg03351460:chr19:19007422-19007288:1;4059/chr12:307:chr12:4919097-4918929:2;4060/chr12:3
07:chr12:4919097-4918929:1;4061/chr8:941:chr8:21647794-21647623:2;4062/chr2:4189:chr2:175202605-1752
02430:2;4063/chr2:4189:chr2:175202605-175202430:1;4064/chr8:941:chr8:21647794-21647623:1;4065/chr4:1
23:chr4:997359-997232:2;4066/chr4:123:chr4:997359-997232:1;4067/chr10:2698:chr10:102586722-102586548:
2;4068/chr10:2698:chr10:102586722-102586548:1;4069/chr7:2143:chr7:49813696-49813547:2;4070/chr7:214
3:chr7:49813696-49813547:1;4071/chr2:4233:chr2:176972686-176972526:2;4072/chr2:4233:chr2:176972686-1
76972526:1;4073/chr19:2730:chr19:31842703-31842529:2;4074/chr19:2730:chr19:31842703-31842529:1;4075/
chr4:773:chr4:5894531-5894359:2;4076/chr4:773:chr4:5894531-5894359:1;4077/chr5:2254:chr5:132161643-1
32161518:2;4078/chr1:4177:chr1:54203679-54203517:2;4079/chr1:4177:chr1:54203679-54203517:1;4080/chr1:
1974:chr1:10698748-10698606:2;4081/chr1:1974:chr1:10698748-10698606:1;4082/chr5:506:chr5:1882419-18
82244:2;4083/chr17:4566:chr17:79919827-79919689:2;4084/chr17:4566:chr17:79919827-79919689:1;4085/chr
22:1308:chr22:41048634-41048459:2;4086/chr7:1497:chr7:27155145-27154971:2;4087/chr15:201:chr15:27017
545-27017418:2;4088/chr15:201:chr15:27017545-27017418:1;4089/chr9:1682:chr9:126135919-126135748:2;4
090/chr9:1682:chr9:126135919-126135748:1;4091/chr1:58:chr1:968445-968288:2;4092/chr1:58:chr1:968445-9
68288:1;4093/chr9:1427:chr9:116226127-116225956:2;4094/chr1:3849:chr1:44872886-44872716:2;4095/chr19:
550:chr19:2251123-2250948:2;4096/chr6:920:chr6:30039324-30039184:2;4097/chr6:920:chr6:30039324-3003
9184:1;4098/chr19:550:chr19:2251123-2250948:1;4099/chr1:1690:chr1:6507591-6507422:2;4100/chr9:1980:ch
r9:130689590-130689421:2;4101/chr19:550:chr19:2250835-2250664:2;4102/chr19:550:chr19:2250835-225066
4:1;4103/chr19:211:chr19:1042155-1041992:2;4104/chr19:211:chr19:1042155-1041992:1;4105/chr8:1962:chr8:
70982199-70982068:2;4106/chr8:1962:chr8:70982199-70982068:1;4107/chr2:117:chr2:946294-946125:2;4108/
chr16:3098:chr16:73100523-73100355:2;4109/chr16:3098:chr16:73100523-73100355:1;4110/chr10:4449:chr10:
133999386-133999214:2;4111/chr14:1137:chr14:77492744-77492577:2;4112/chr14:1137:chr14:77492744-774
92577:1;4113/chr8:3776:chr8:145806718-145806546:2;4114/chr8:3776:chr8:145806718-145806546:1;4115/chr
9:1427:chr9:116226127-116225956:1;4116/chr1:1690:chr1:6507591-6507422:1;4117/chr9:1980:chr9:13068959
0-130689421:1;4118/chr5:1664:chr5:66462587-66462462:2;4119/chr5:1664:chr5:66462587-66462462:1;4120/c
hr10:386:chr10:5734858-5734698:1;4121/chr8:656:chr8:10590236-10590098:2;4122/chr8:656:chr8:10590236-
10590098:1;4123/chr20:2983:chr20:62369570-62369427:2;4124/chr10:2898:chr10:106028588-106028420:2;41
25/chr10:2898:chr10:106028588-106028420:1;4126/chr9:1708:chr9:126777946-126777780:2;4127/chr9:1708:c
hr9:126777946-126777780:1;4128/chr15:523:chr15:37172599-37172470:2;4129/chr15:523:chr15:37172599-37
172470:1;4130/chr10:2949:chr10:108924625-108924467:2;4131/chr10:2949:chr10:108924625-108924467:1;41
32/chr22:1308:chr22:41048634-41048459:1;4133/chr7:1497:chr7:27155145-27154971:1;4134/chr6:95:chr6:137
8677-1378512:2;4135/chr6:95:chr6:1378677-1378512:1;4136/chr2:4187:chr2:175201854-175201680:2;4137/ch
r2:4187:chr2:175201854-175201680:1;4138/chr8:3611:chr8:144810598-144810430:2;4139/chr8:3611:chr8:144
810598-144810430:1;4140/chr5:2417:chr5:136834373-136834199:2;4141/chr5:2417:chr5:136834373-1368341
99:1;4142/chr17:1558:chr17:28088417-28088248:2;4143/chr17:1558:chr17:28088417-28088248:1;4144/chr2:5
386:chr2:239072954-239072779:2;4145/chr8:3309:chr8:143545858-143545729:2;4146/chr8:3309:chr8:143545
858-143545729:1;4147/chr9:1226:chr9:100616660-100616534:2;4148/chr9:1226:chr9:100616660-100616534:1;
4149/chr2:5386:chr2:239072954-239072779:1;4150/chr9:2223:chr9:133540401-133540235:2;4151/chr9:2223:
chr9:133540401-133540235:1;4152/chr13:45:chr13:20176518-20176343:2;4153/chr13:1184:chr13:109793302-
109793174:2;4154/chr13:1184:chr13:109793302-109793174:1;4155/chr11:4678:chr11:130029583-130029419:
2;4156/chr11:4678:chr11:130029583-130029419:1;4157/chr13:45:chr13:20176518-20176343:1;4158/chr19:367:
chr19:1467595-1467427:2;4159/chr19:367:chr19:1467595-1467427:1;4160/chr13:877:chr13:79183568-791833
98:2;4161/chr13:877:chr13:79183568-79183398:1;4162/chr6:3358:chr6:168502101-168501934:2;4163/chr6:33
58:chr6:168502101-168501934:1;4164/chr15:2393:chr15:99645392-99645218:2;4165/chr15:2393:chr15:99645
392-99645218:1;4166/chr4:2973:chr4:188916656-188916483:2;4167/chr4:2973:chr4:188916656-188916483:1;
4168/chr5:1679:chr5:68711138-68710972:2;4169/chr5:1679:chr5:68711138-68710972:1;4170/chr5:2254:chr5:1
32161643-132161518:1;4171/chr18:77:chr18:4455636-4455486:2;4172/chr18:77:chr18:4455636-4455486:1;41
73/chr7:4786:chr7:157406102-157405935:2;4174/chr7:4786:chr7:157406102-157405935:1;4175/chr9:239:chr9:
23821953-23821816:2;4176/chr9:239:chr9:23821953-23821816:1;4177/chr6:105:chr6:1393307-1393144:2;417
8/chr6:105:chr6:1393307-1393144:1;4179/chrX:1560:chrX:133684982-133684808:2;4180/chr1:7360:chr1:2469
52603-246952452:2;4181/chr1:7360:chr1:246952603-246952452:1;4182/chr18:97:chr18:5630029-5629868:2;4
183/chr18:97:chr18:5630029-5629868:1;4184/chr22:1873:chr22:46500126-46499997:2;4185/chr22:1873:chr22:
46500126-46499997:1;4186/chr14:626:chr14:59931635-59931510:2;4187/chr14:626:chr14:59931635-5993151
0:1;4188/chr4:1475:chr4:20254329-20254159:2;4189/chr4:1475:chr4:20254329-20254159:1;4190/chr15:264:ch
r15:28352656-28352482:2;4191/chr15:264:chr15:28352656-28352482:1;4192/chr22:2205:chr22:48970972-489
70828:2;4193/chr22:2205:chr22:48970972-48970828:1;4194/chr14:2038:chr14:101923831-101923660:2;4195/
chr14:2038:chr14:101923831-101923660:1;4196/chr2:5420:chr2:239755724-239755578:1;4197/chr15:203:chr1
5:27018638-27018470:2;4198/chr15:203:chr15:27018638-27018470:1;4199/chr12:1319:chr12:54427781-54427
637:2;4200/chr19:4937:chr19:58868006-58867833:2;4201/chr19:4937:chr19:58868006-58867833:1;4202/chr9:
2443:chr9:135462247-135462117:2;4203/chr9:2443:chr9:135462247-135462117:1;4204/chr15:2003:chr15:899
22235-89922066:2;4205/chr15:2003:chr15:89922235-89922066:1;4206/chr6:2142:chr6:100061733-100061608:
2;4207/chr6:2142:chr6:100061733-100061608:1;4208/chr16:3585:chr16:85320838-85320668:2;4209/chr16:358
5:chr16:85320838-85320668:1;4210/chr10:1049:chr10:30024824-30024693:2;4211/chr15:1175:chr15:6732612
6-67325980:1;4212/chr10:1049:chr10:30024824-30024693:1;4213/chr1:3957:chr1:47905286-47905124:2;4214/
chr1:3957:chr1:47905286-47905124:1;4215/chr10:2740:chr10:102900030-102899855:2;4216/chr10:2740:chr10:
102900030-102899855:1;4217/chr8:1107:chr8:24771275-24771100:2;4218/chr8:1107:chr8:24771275-2477110
0:1;4219/chr20:524:chr20:21376562-21376424:2;4220/chr20:524:chr20:21376562-21376424:1;4221/chr8:2786:
chr8:140716233-140716058:2;4222/chr8:2786:chr8:140716233-140716058:1;4223/chr13:865:chr13:79170184-
79170016:2;4224/chr13:865:chr13:79170184-79170016:1;4225/chr12:1084:chr12:50297660-50297510:2;4226/
chr16:241:chr16:1040972-1040802:2;4227/chr16:241:chr16:1040972-1040802:1;4228/chr19:4654:chr19:55598
560-55598429:1;4229/chr20:1816:chr20:55206015-55205849:2;4230/chr19:2032:chr19:17439780-17439654:2;
4231/chr20:1816:chr20:55206015-55205849:1;4232/chrX:27:chrX:334573-334430:2;4233/chrX:27:chrX:334573-
334430:1;4234/chr17:3474:chr17:73585037-73584909:2;4235/chr17:3474:chr17:73585037-73584909:1;4236/c
hrX:132:chrX:933818-933647:1;4237/chr15:839:chr15:52404890-52404719:2;4238/chr15:839:chr15:52404890-
52404719:1;4239/chr12:1542:chr12:66123479-66123351:2;4240/chr12:1542:chr12:66123479-66123351:1;4241/
chr13:917:chr13:88324731-88324561:2;4242/chr13:917:chr13:88324731-88324561:1;4243/chr14:1768:chr14:9
9712787-99712644:2;4244/chr14:1768:chr14:99712787-99712644:1;4245/cg27014135:chr16:25703603-25703
478:2;4246/cg27014135:chr16:25703603-25703478:1;4247/cg04140862:chr14:70654701-70654533:1;4248/chr
11:4527:chr11:126286809-126286638:2;4249/chr11:4527:chr11:126286809-126286638:1;4250/chr19:4937:chr
19:58868081-58867930:2;4251/chr19:4937:chr19:58868081-58867930:1;4252/chr19:362:chr19:1457241-14570
70:2;4253/chr19:362:chr19:1457241-1457070:1;4254/chr3:2636:chr3:138664772-138664647:2;4255/chr3:2636:
chr3:138664772-138664647:1;4256/chr20:1728:chr20:50721874-50721710:2;4257/chr20:1728:chr20:50721874-
50721710:1;4258/chr9:3508:chr9:139740890-139740715:2;4259/chr9:3508:chr9:139740890-139740715:1;426
0/cg07748540:chr11:104034622-104034493:1;4261/chr19:1417:chr19:9473753-9473594:2;4262/chr18:891:chr
18:47795096-47794921:2;4263/chr12:3052:chr12:130389012-130388837:2;4264/chr10:3710:chr10:128077448-
128077273:2;4265/chr10:3710:chr10:128077448-128077273:1;4266/chr2:2852:chr2:107503402-107503235:2;4
267/chr2:2852:chr2:107503402-107503235:1;4268/chr1:4372:chr1:63790339-63790166:2;4269/chr1:4372:chr1:
63790339-63790166:1;4270/chr11:2774:chr11:68145669-68145544:1;4271/chr19:3497:chr19:41106090-41105
919:2;4272/chr19:3497:chr19:41106090-41105919:1;4273/chr5:506:chr5:1882479-1882307:2;4274/chr5:506:ch
r5:1882479-1882307:1;4275/chr4:1727:chr4:44450672-44450505:2;4276/chr4:1727:chr4:44450672-44450505:
1;4277/chr1:645:chr1:2706659-2706490:2;4278/chr1:645:chr1:2706659-2706490:1;4279/chr7:4109:chr7:15065
5373-150655202:2;4280/chr7:4109:chr7:150655373-150655202:1;4281/chr2:259:chr2:1748097-1747925:2;428
2/chr2:259:chr2:1748097-1747925:1;4283/chr19:1417:chr19:9473753-9473594:1;4284/chr12:1447:chr12:58013
641-58013472:2;4285/chr12:1447:chr12:58013641-58013472:1;4286/chr4:759:chr4:5710373-5710248:2;4287/c
hr4:759:chr4:5710373-5710248:1;4288/chr5:504:chr5:1878678-1878542:2;4289/chr5:504:chr5:1878678-18785
42:1;4290/chr5:705:chr5:2751859-2751722:2;4291/chr5:705:chr5:2751859-2751722:1;4292/chr19:56:chr19:518
996-518826:2;4293/chr19:56:chr19:518996-518826:1;4294/chr15:219:chr15:27216913-27216787:2;4295/chr15:
219:chr15:27216913-27216787:1;4296/chr9:3751:chr9:140681076-140680950:1;4297/chr17:2778:chr17:58227
861-58227695:2;4298/chr17:2778:chr17:58227861-58227695:1;4299/chr8:1720:chr8:54792258-54792133:2;43
00/chr2:4217:chr2:176947321-176947190:2;4301/chr11:2492:chr11:65313988-65313813:2;4302/chr11:2492:ch
r11:65313988-65313813:1;4303/chr7:547:chr7:1577120-1576948:2;4304/chr7:547:chr7:1577120-1576948:1;43
05/chr11:2492:chr11:65314345-65314220:2;4306/chr11:2492:chr11:65314345-65314220:1;4307/chr21:100:chr
21:27945575-27945450:2;4308/chr21:100:chr21:27945575-27945450:1;4309/chr2:4131:chr2:172965219-17296
5045:2;4310/chr2:4131:chr2:172965219-172965045:1;4311/chr15:2063:chr15:90543525-90543355:2;4312/chr1
5:2063:chr15:90543525-90543355:1;4313/chr10:1958:chr10:73848037-73847885:2;4314/chr10:1958:chr10:738
48037-73847885:1;4315/chr8:3703:chr8:145106757-145106631:2;4316/chr8:3703:chr8:145106757-145106631:
1;4317/chr6:2232:chr6:107955926-107955751:2;4318/chr6:2232:chr6:107955926-107955751:1;4319/chr5:2254:
chr5:132161373-132161217:2;4320/chr5:2254:chr5:132161373-132161217:1;4321/chr11:692:chr11:2237011-2
236846:2;4322/chr11:692:chr11:2237011-2236846:1;4323/chr12:1282:chr12:54345739-54345565:2;4324/chr17:
4139:chr17:77788791-77788627:2;4325/chr11:4765:chr11:131780660-131780487:2;4326/chr5:3129:chr5:1708
48128-170847954:2;4327/chr17:3474:chr17:73584997-73584831:2;4328/chr8:3759:chr8:145698283-14569813
4:2;4329/chr8:3759:chr8:145698283-145698134:1;4330/chr10:4868:chr10:135016006-135015832:2;4331/chr10:
4868:chr10:135016006-135015832:1;4332/chrX:810:chrX:48685128-48684999:2;4333/chrX:810:chrX:4868512
8-48684999:1;4334/chr10:2407:chr10:94451670-94451507:2;4335/chr10:2407:chr10:94451670-94451507:1;43
36/chr17:1855:chr17:36666713-36666556:2;4337/chr17:1855:chr17:36666713-36666556:1;4338/chr10:784:chr
10:16562252-16562097:2;4339/chr10:784:chr10:16562252-16562097:1;4340/chr15:523:chr15:37172870-37172
725:2;4341/chr15:523:chr15:37172870-37172725:1;4342/chr18:994:chr18:55095432-55095276:2;4343/chr18:9
94:chr18:55095432-55095276:1;4344/chr16:4109:chr16:88497443-88497272:2;4345/chr16:4109:chr16:884974
43-88497272:1;4346/chr10:1958:chr10:73848257-73848107:2;4347/chr10:1958:chr10:73848257-73848107:1;4
348/chr11:4458:chr11:125036819-125036669:2;4349/chr11:4458:chr11:125036819-125036669:1;4350/chr10:8
72:chr10:22634346-22634171:2;4351/chr10:872:chr10:22634346-22634171:1;4352/chr6:95:chr6:1378905-1378
750:2;4353/chr6:95:chr6:1378905-1378750:1;4354/chr18:763:chr18:44337107-44336975:2;4355/chr22:141:chr
22:19512078-19511945:2;4356/chr7:1788:chr7:35293910-35293746:2;4357/chr7:1788:chr7:35293910-3529374
6:1;4358/chr8:1752:chr8:56014853-56014711:2;4359/chr8:1752:chr8:56014853-56014711:1;4360/chr4:122:chr
4:996415-996264:2;4361/chr4:122:chr4:996415-996264:1;4362/chr3:160:chr3:9595432-9595263:2;4363/chr3:1
60:chr3:9595432-9595263:1;4364/chr13:870:chr13:79176643-79176476:2;4365/chr13:870:chr13:79176643-791
76476:1;4366/chr8:738:chr8:11560111-11559974:2;4367/chr8:738:chr8:11560111-11559974:1;4368/chr2:1902:
chr2:63275289-63275122:1;4369/chr22:1873:chr22:46500395-46500230:2;4370/chr22:1873:chr22:46500395-4
6500230:1;4371/chr18:91:chr18:5543489-5543323:2;4372/chr18:91:chr18:5543489-5543323:1;4373/chr13:368:
chr13:28674683-28674526:2;4374/chr13:368:chr13:28674683-28674526:1;4375/chr22:1094:chr22:38478869-3
8478699:2;4376/chr22:1094:chr22:38478869-38478699:1;4377/chr16:2882:chr16:67428601-67428436:2;4378/
chr16:2882:chr16:67428601-67428436:1;4379/chr10:1271:chr10:43762434-43762276:2;4380/chr17:274:chr17:
1960324-1960165:2;4381/chr17:274:chr17:1960324-1960165:1;4382/chr10:1271:chr10:43762434-43762276:1;
4383/chr17:1676:chr17:32484355-32484180:1;4384/chr10:2138:chr10:81002084-81001915:1;4385/chr9:1715:c
hr9:126780132-126780007:2;4386/chr9:1715:chr9:126780132-126780007:1;4387/chr17:276:chr17:1961109-19
60963:2;4388/chr17:276:chr17:1961109-1960963:1;4389/chr15:1841:chr15:84322497-84322322:2;4390/chr15:
1841:chr15:84322497-84322322:1;4391/chr1:1852:chr1:8277864-8277739:1;4392/chr13:1076:chr13:10064206
8-100641943:2;4393/chr2:1346:chr2:27530914-27530740:2;4394/chr2:1346:chr2:27530914-27530740:1;4395/c
hr19:1749:chr19:14090089-14089915:1;4396/chr2:3108:chr2:115919729-115919583:2;4397/chr2:3108:chr2:11
5919729-115919583:1;4398/cg19763461:chr2:63284580-63284411:1;4399/chr6:21:chr6:392067-391900:2;440
0/chr6:21:chr6:392067-391900:1;4401/chr19:918:chr19:4328973-4328812:1;4402/chr14:1402:chr14:92789961-
92789812:2;4403/chr14:1402:chr14:92789961-92789812:1;4404/chr2:2852:chr2:107503513-107503344:2;4405/
chr4:616:chr4:3734447-3734285:2;4406/chr4:616:chr4:3734447-3734285:1;4407/chr18:966:chr18:53447862-5
3447705:2;4408/chr18:966:chr18:53447862-53447705:1;4409/chr2:1902:chr2:63274958-63274785:2;4410/chr1
3:1196:chr13:110437586-110437432:2;4411/chr16:2882:chr16:67428372-67428219:2;4412/chr16:2882:chr16:6
7428372-67428219:1;4413/chr17:2816:chr17:59488655-59488492:2;4414/chr17:2816:chr17:59488655-594884
92:1;4415/chr1:252:chr1:1565660-1565491:2;4416/chr1:252:chr1:1565660-1565491:1;4417/chr17:1855:chr17:3
6667234-36667073:2;4418/chr17:1855:chr17:36667234-36667073:1;4419/chr1:6194:chr1:203044828-2030446
77:1;4420/chr2:1902:chr2:63274958-63274785:1;4421/chr9:1226:chr9:100616968-100616796:2;4422/chr9:122
6:chr9:100616968-100616796:1;4423/chr19:567:chr19:2291321-2291158:2;4424/chr19:567:chr19:2291321-229
1158:1;4425/chr19:1699:chr19:13215542-13215370:2;4426/chr1:3539:chr1:37500019-37499883:2;4427/chr1:3
539:chr1:37500019-37499883:1;4428/chr15:1832:chr15:83953323-83953184:2;4429/chr15:1832:chr15:839533
23-83953184:1;4430/chr1:5882:chr1:180202555-180202383:2;4431/chr1:5882:chr1:180202555-180202383:1;4
432/chr19:4004:chr19:48984036-48983865:2;4433/chr19:4004:chr19:48984036-48983865:1;4434/chr2:2852:ch
r2:107503513-107503344:1;4435/chr3:1771:chr3:73673807-73673638:2;4436/chr3:1771:chr3:73673807-73673
638:1;4437/chr8:3759:chr8:145698518-145698393:2;4438/chr8:3759:chr8:145698518-145698393:1;4439/chr3:
220:chr3:10858102-10857954:2;4440/chr3:220:chr3:10858102-10857954:1;4441/chr2:1230:chr2:25500371-255
00226:2;4442/chr2:1230:chr2:25500371-25500226:1;4443/chr17:859:chr17:8926884-8926716:2;4444/chr17:85
9:chr17:8926884-8926716:1;4445/chr2:3999:chr2:162283734-162283570:2;4446/chr2:3999:chr2:162283734-16
2283570:1;4447/chr7:4109:chr7:150655712-150655585:2;4448/chr7:4109:chr7:150655712-150655585:1;4449/
chr5:3116:chr5:170735731-170735573:2;4450/chr5:3116:chr5:170735731-170735573:1;4451/chr11:2667:chr11:
67290793-67290618:1;4452/chr13:519:chr13:37006315-37006146:2;4453/chr13:519:chr13:37006315-3700614
6:1;4454/chr20:16:chr20:591041-590883:2;4455/chr20:16:chr20:591041-590883:1;4456/chr19:1417:chr19:9473
704-9473529:2;4457/chr19:1417:chr19:9473704-9473529:1;4458/chr10:1049:chr10:30024300-30024127:2;445
9/chr10:1049:chr10:30024300-30024127:1;4460/chr14:288:chr14:34419856-34419690:1;4461/chr4:1277:chr4:8
873874-8873737:2;4462/chr4:1277:chr4:8873874-8873737:1;4463/chr3:2768:chr3:147127729-147127565:2;44
64/chr3:2768:chr3:147127729-147127565:1;4465/chr12:3619:chr12:133485256-133485127:2;4466/chr12:3619:
chr12:133485256-133485127:1;4467/chr11:141:chr11:849586-849411:2;4468/chr6:2135:chr6:100051256-1000
51103:1;4469/chr2:605:chr2:5837141-5836990:2;4470/chr2:605:chr2:5837141-5836990:1;4471/chr18:1125:chr
18:63418046-63417893:2;4472/chr18:1125:chr18:63418046-63417893:1;4473/chr2:1926:chr2:63286872-63286
719:2;4474/chr2:1926:chr2:63286872-63286719:1;4475/chr20:732:chr20:25129187-25129014:2;4476/chr20:73
2:chr20:25129187-25129014:1;4477/chr5:2354:chr5:134825921-134825774:2;4478/chr17:273:chr17:1959837-1
959683:2;4479/chr17:273:chr17:1959837-1959683:1;4480/chr12:3095:chr12:130647294-130647166:2;4481/chr
12:3095:chr12:130647294-130647166:1;4482/chr13:982:chr13:96294431-96294279:2;4483/chr13:982:chr13:96
294431-96294279:1;4484/chr7:2143:chr7:49813881-49813756:2;4485/chr7:2143:chr7:49813881-49813756:1;4
486/chr17:965:chr17:10102122-10101966:2;4487/chr17:965:chr17:10102122-10101966:1;4488/chr21:1182:chr
21:46848236-46848064:2;4489/chr21:1182:chr21:46848236-46848064:1;4490/chr8:263:chr8:1444072-1443908:
2;4491/chr8:263:chr8:1444072-1443908:1;4492/chr21:1265:chr21:47062764-47062591:2;4493/chr21:1265:chr
21:47062764-47062591:1;4494/chr1:691:chr1:2777213-2777070:2;4495/chr18:566:chr18:31020892-31020737:
2;4496/chr18:566:chr18:31020892-31020737:1;4497/chr20:534:chr20:21491454-21491279:2;4498/chr20:534:c
hr20:21491454-21491279:1;4499/chr3:20:chr3:2140928-2140801:2;4500/chr3:20:chr3:2140928-2140801:1;450
1/chr7:2696:chr7:72848500-72848343:2;4502/chr1:3659:chr1:39957400-39957262:2;4503/chr1:3659:chr1:3995
7400-39957262:1;4504/chr20:2966:chr20:62272898-62272769:2;4505/chr5:2198:chr5:127874800-127874673:2;
4506/chr5:2198:chr5:127874800-127874673:1;4507/chr19:2032:chr19:17440035-17439905:2;4508/chr19:2032:
chr19:17440035-17439905:1;4509/chr7:1422:chr7:25892622-25892470:2;4510/chr7:1422:chr7:25892622-2589
2470:1;4511/chr21:1253:chr21:47010268-47010093:2;4512/chr21:158:chr21:32931742-32931578:2;4513/chr21:
158:chr21:32931742-32931578:1;4514/chr16:241:chr16:1041202-1041028:2;4515/chr22:2676:chr22:50496653-
50496512:2;4516/chr22:2676:chr22:50496653-50496512:1;4517/chr18:723:chr18:43913977-43913812:2;4518/
chr18:723:chr18:43913977-43913812:1;4519/chr3:2629:chr3:138658509-138658375:2;4520/chr3:2629:chr3:13
8658509-138658375:1;4521/chr7:3399:chr7:112430518-112430343:2;4522/chr7:3399:chr7:112430518-112430
343:1;4523/cg12587766:chr5:38556497-38556325:2;4524/chr15:2003:chr15:89922329-89922154:2;4525/chr15:
2003:chr15:89922329-89922154:1;4526/chr10:629:chr10:11784556-11784407:2;4527/chr10:629:chr10:117845
56-11784407:1;4528/chr2:2227:chr2:74743203-74743048:2;4529/chr3:2385:chr3:128212280-128212149:2;453
0/chr1:4486:chr1:77334071-77333897:1;4531/chr12:1296:chr12:54355591-54355426:2;4532/chr17:2375:chr17:
46711253-46711089:2;4533/chr17:2375:chr17:46711253-46711089:1;4534/chr12:1296:chr12:54355591-54355
426:1;4535/chr10:4591:chr10:134601877-134601703:2;4536/chr10:4591:chr10:134601877-134601703:1;4537/
chr6:1972:chr6:84418834-84418700:2;4538/chr6:1972:chr6:84418834-84418700:1;4539/chr19:211:chr19:1042
032-1041857:2;4540/chr11:2224:chr11:62212202-62212039:2;4541/chr11:2224:chr11:62212202-62212039:1;4
542/chr8:3703:chr8:145106475-145106305:2;4543/chr8:3703:chr8:145106475-145106305:1;4544/chr15:2063:c
hr15:90543455-90543308:1;4545/chr22:2705:chr22:50629112-50628937:1;4546/chr17:1078:chr17:12877734-1
2877568:2;4547/chr17:1078:chr17:12877734-12877568:1;4548/chr8:1695:chr8:53852581-53852433:2;4549/chr
8:1695:chr8:53852581-53852433:1;4550/chr9:3497:chr9:139716160-139716015:2;4551/chr9:3497:chr9:139716
160-139716015:1;4552/chr13:386:chr13:29107331-29107195:2;4553/chr13:386:chr13:29107331-29107195:1;4
554/cg11666087:chr1:49242637-49242497:2;4555/cg16573178:chr1:49242637-49242497:2;4556/cg11666087:
chr1:49242637-49242497:1;4557/cg16573178:chr1:49242637-49242497:1;4558/chr19:4808:chr19:57050435-5
7050286:2;4559/chr19:4808:chr19:57050435-57050286:1;4560/chr10:958:chr10:26680817-26680643:2;4561/c
hr10:958:chr10:26680817-26680643:1;4562/chr18:1044:chr18:56940333-56940164:2;4563/chr18:1044:chr18:5
6940333-56940164:1;4564/chr13:982:chr13:96294354-96294224:2;4565/chr13:982:chr13:96294354-96294224:
1;4566/chr10:3225:chr10:119305108-119304933:2;4567/chr10:3225:chr10:119305108-119304933:1;4568/chr7:
5168:chr7:158937611-158937438:2;4569/chr7:5168:chr7:158937611-158937438:1;4570/chr12:1125:chr12:522
15612-52215466:2;4571/chr12:1125:chr12:52215612-52215466:1;4572/chr22:2791:chr22:51136022-51135849:
2;4573/chr22:2791:chr22:51136022-51135849:1;4574/cg12587766:chr5:38556497-38556325:1;4575/chr17:350
2:chr17:73749729-73749597:2;4576/chr17:3502:chr17:73749729-73749597:1;4577/chr2:2227:chr2:74743203-7
4743048:1;4578/chr3:2385:chr3:128212280-128212149:1;4579/chr10:4583:chr10:134599116-134598942:2;458
0/chr4:24:chr4:568792-568654:2;4581/chr4:24:chr4:568792-568654:1;4582/chr10:4583:chr10:134599116-1345
98942:1;4583/chr15:1832:chr15:83953571-83953400:2;4584/chr15:1832:chr15:83953571-83953400:1;4585/chr
7:4724:chr7:157072252-157072088:2;4586/chr7:4724:chr7:157072252-157072088:1;4587/chr19:211:chr19:104
2032-1041857:1;4588/chr8:2423:chr8:120220685-120220558:2;4589/chr8:2423:chr8:120220685-120220558:1;
4590/chr16:2915:chr16:67918758-67918597:1;4591/chr4:470:chr4:2820480-2820317:2;4592/chr4:470:chr4:282
0480-2820317:1;4593/chr14:1434:chr14:93154181-93154008:1;4594/chr7:1376:chr7:23245809-23245651:2;45
95/chr7:1376:chr7:23245809-23245651:1;4596/chr13:452:chr13:31480569-31480437:2;4597/chr13:452:chr13:3
1480569-31480437:1;4598/chr7:2162:chr7:50343793-50343654:2;4599/chr7:2162:chr7:50343793-50343654:1;
4600/chr2:3718:chr2:131797625-131797475:2;4601/chr2:3718:chr2:131797625-131797475:1;4602/chr17:1243:
chr17:17626139-17625965:2;4603/chr17:1243:chr17:17626139-17625965:1;4604/chr17:2417:chr17:47073452-
47073308:2;4605/chr17:2417:chr17:47073452-47073308:1;4606/chr17:176:chr17:1173876-1173729:2;4607/chr
17:176:chr17:1173876-1173729:1;4608/chr15:937:chr15:58358425-58358264:2;4609/chr15:937:chr15:5835842
5-58358264:1;4610/chr5:2392:chr5:135266577-135266405:2;4611/chr5:2392:chr5:135266577-135266405:1;46
12/chr17:4511:chr17:79615177-79615039:2;4613/chr17:4511:chr17:79615177-79615039:1;4614/chr5:2354:chr
5:134825921-134825774:1;4615/chr22:1790:chr22:46263482-46263324:2;4616/chr22:1790:chr22:46263482-46
263324:1;4617/chr22:2703:chr22:50623333-50623190:2;4618/chr22:2703:chr22:50623333-50623190:1;4619/c
hr13:1471:chr13:112759139-112758994:2;4620/chr13:1471:chr13:112759139-112758994:1;4621/chr15:1538:c
hr15:76630446-76630274:2;4622/chr15:1538:chr15:76630446-76630274:1;4623/chr7:2148:chr7:49815373-498
15201:2;4624/chr7:2148:chr7:49815373-49815201:1;4625/chr4:1272:chr4:8863792-8863664:2;4626/chr1:1408:
chr1:4715522-4715396:2;4627/chr1:1408:chr1:4715522-4715396:1;4628/chr4:1272:chr4:8863792-8863664:1;4
629/chr1:691:chr1:2777213-2777070:1;4630/chr16:2445:chr16:54324352-54324220:2;4631/chr16:2445:chr16:5
4324352-54324220:1;4632/chr15:1205:chr15:68122181-68122035:2;4633/chr13:714:chr13:53421595-5342143
9:2;4634/chr13:714:chr13:53421595-53421439:1;4635/chr7:2696:chr7:72848500-72848343:1;4636/chr8:1971:c
hr8:72460165-72459997:2;4637/chr20:2966:chr20:62272898-62272769:1;4638/chr8:1971:chr8:72460165-7245
9997:1;4639/chr2:5038:chr2:233285674-233285528:2;4640/chr2:5038:chr2:233285674-233285528:1;4641/chr1
7:176:chr17:1174236-1174062:2;4642/chr17:176:chr17:1174236-1174062:1;4643/chr15:1205:chr15:68122181-
68122035:1;4644/chr21:1253:chr21:47010268-47010093:1;4645/chr10:1066:chr10:30348021-30347848:2;4646/
chr10:1066:chr10:30348021-30347848:1;4647/chr17:2823:chr17:59529538-59529363:2;4648/chr17:2823:chr1
7:59529538-59529363:1;4649/chr8:1276:chr8:31498016-31497870:2;4650/chr8:1276:chr8:31498016-31497870:
1;4651/chr16:241:chr16:1041202-1041028:1;4652/chr2:4189:chr2:175202527-175202385:2;4653/chr2:4189:ch
r2:175202527-175202385:1;4654/chr5:1710:chr5:72594396-72594231:2;4655/chr5:1710:chr5:72594396-72594
231:1;4656/chr10:3131:chr10:118030795-118030641:2;4657/chr10:3131:chr10:118030795-118030641:1;4658/
chr3:1095:chr3:47051083-47050944:2;4659/chr3:1095:chr3:47051083-47050944:1;4660/chr10:1053:chr10:300
25956-30025824:2;4661/chr10:1053:chr10:30025956-30025824:1;4662/chr22:1823:chr22:46368462-46368287:
2;4663/chr22:1823:chr22:46368462-46368287:1;4664/chr22:162:chr22:19711633-19711462:2;4665/chr22:162:
chr22:19711633-19711462:1;4666/chr10:950:chr10:26223491-26223364:2;4667/chr10:950:chr10:26223491-26
223364:1;4668/chr1:1739:chr1:7022139-7021971:1;4669/chr8:3689:chr8:145052136-145052006:2;4670/chr8:3
689:chr8:145052136-145052006:1;4671/cg27200446:chr6:41606486-41606315:2;4672/cg27200446:chr6:4160
6486-41606315:1;4673/chr2:4739:chr2:219866343-219866217:2;4674/chr2:4739:chr2:219866343-219866217:1;
4675/chr10:958:chr10:26680894-26680726:2;4676/chr10:524:chr10:8097801-8097629:2;4677/chr10:524:chr10:
8097801-8097629:1;4678/chr10:958:chr10:26680894-26680726:1;4679/chr14:847:chr14:69095246-69095093:
2;4680/chr14:847:chr14:69095246-69095093:1;4681/chr10:2667:chr10:102475579-102475404:2;4682/chr10:26
67:chr10:102475579-102475404:1;4683/chr12:1112:chr12:51717924-51717788:2;4684/chr12:1112:chr12:5171
7924-51717788:1;4685/chr14:2078:chr14:102027682-102027508:2;4686/chr14:2078:chr14:102027682-102027
508:1;4687/chr1:604:chr1:2461934-2461762:2;4688/chr1:604:chr1:2461934-2461762:1;4689/chr5:1926:chr5:92
906789-92906627:2;4690/chr5:1926:chr5:92906789-92906627:1;4691/chr4:2703:chr4:172734525-172734362:2;
4692/chr4:2703:chr4:172734525-172734362:1;4693/cg01090834:chr21:38081202-38081050:2;4694/cg010908
34:chr21:38081202-38081050:1;4695/chr2:3997:chr2:162280627-162280452:2;4696/chr2:3997:chr2:16228062
7-162280452:1;4697/chr6:705:chi6:2751212-2751038:2;4698/chr5:705:chr6:2751212-2751038:1;4699/chr15:18
42:chr15:84322823-84322685:2;4700/chr15:1842:chr15:84322823-84322685:1;4701/chr15:207:chr15:2711237
0-27112216:2;4702/chr15:207:chr15:27112370-27112216:1;4703/chr20:1812:chr20:55202313-55202138:2;470
4/chr20:1812:chr20:55202313-55202138:1;4705/chr5:1710:chr5:72594236-72594071:2;4706/chr5:1710:chr5:72
594236-72594071:1;4707/chr18:994:chr18:55094947-55094772:2;4708/chr18:994:chr18:55094947-55094772:1;
4709/chr10:4591:chr10:134601955-134601784:2;4710/chr10:4591:chr10:134601955-134601784:1;4711/chr22:
2149:chr22:48886069-48885943:2;4712/chr22:2149:chr22:48886069-48885943:1;4713/chr2:3000:chr2:110372
462-110372324:2;4714/chr2:3000:chr2:110372462-110372324:1;4715/chr17:2797:chr17:59473560-59473410:2;
4716/chr17:2797:chr17:59473560-59473410:1;4717/chr8:1033:chr8:22548409-22548240:2;4718/chr8:1033:chr
8:22548409-22548240:1;4719/chr12:1460:chr12:58129983-58129822:2;4720/chr12:1460:chr12:58129983-5812
9822:1;4721/chr5:3858:chr5:179244344-179244173:2;4722/chr5:3858:chr5:179244344-179244173:1;4723/chr1
2:1757:chr12:95941963-95941829:2;4724/chr12:1757:chr12:95941963-95941829:1;4725/chr7:3501:chr7:12767
1993-127671859:2;4726/chr7:3501:chr7:127671993-127671859:1;4727/chr19:830:chr19:3786599-3786443:2;4
728/chr19:830:chr19:3786599-3786443:1;4729/chr1:2371:chr1:16085635-16085460:2;4730/chr1:2371:chr1:160
85635-16085460:1;4731/chr2:5206:chr2:236579795-236579650:2;4732/chr2:5206:chr2:236579795-236579650:
1;4733/chr17:3474:chr17:73584687-73584518:2;4734/chr17:3474:chr17:73584687-73584518:1;4735/chr1:3659:
chr1:39957785-39957619:2;4736/chr1:3659:chr1:39957785-39957619:1;4737/chr12:1282:chr12:54345739-543
45565:1;4738/chr1:1690:chr1:6507456-6507305:2;4739/chr1:1690:chr1:6507456-6507305:1;4740/chr9:2117:ch
r9:132382687-132382516:2;4741/chr9:2117:chr9:132382687-132382516:1;4742/chr17:4139:chr17:77788791-7
7788627:1;4743/chr11:4765:chr11:131780660-131780487:1;4744/chr5:3129:chr5:170848128-170847954:1;474
5/chr17:3474:chr17:73584997-73584831:1;4746/chr5:3649:chr5:178017056-178016917:2;4747/chr5:3649:chr5:
178017056-178016917:1;4748/chr2:4224:chr2:176957930-176957781:2;4749/chr2:4224:chr2:176957930-1769
57781:1;4750/chr18:763:chr18:44337107-44336975:1;4751/chr22:141:chr22:19512078-19511945:1;4752/chr7:
1085:chr7:4923093-4922918:2;4753/chr7:1085:chr7:4923093-4922918:1;4754/chr14:2165:chr14:103395683-10
3395530:2;4755/chr14:2165:chr14:103395683-103395530:1;4756/chr17:275:chr17:1960610-1960450:2;4757/c
hr17:275:chr17:1960610-1960450:1;4758/chr4:1405:chr4:13545653-13545494:2;4759/chr4:1405:chr4:1354565
3-13545494:1;4760/chr4:1270:chr4:8863147-8862993:2;4761/chr4:1270:chr4:8863147-8862993:1;4762/chr13:1
076:chr13:100642068-100641943:1;4763/chr8:766:chr8:12809289-12809164:2;4764/chr8:766:chr8:12809289-1
2809164:1;4765/chr15:219:chr15:27216433-27216299:2;4766/chr15:219:chr15:27216433-27216299:1;4767/chr
14:2166:chr14:103395985-103395810:2;4768/chr14:2166:chr14:103395985-103395810:1;4769/chr12:1757:chr
12:95942489-95942317:2;4770/chr12:1757:chr12:95942489-95942317:1;4771/chr1:3709:chr1:41327658-41327
484:2;4772/chr12:428:chr12:6665399-6665270:2;4773/chr12:428:chr12:6665399-6665270:1;4774/chr10:4269:c
hr10:133109835-133109670:2;4775/chr3:2880:chr3:156544239-156544108:2;4776/chr3:2880:chr3:156544239-
156544108:1;4777/chr13:1196:chr13:110437586-110437432:1;4778/chr10:4269:chr10:133109835-133109670:
1;4779/chr12:438:chr12:6883091-6882918:2;4780/chr12:438:chr12:6883091-6882918:1;4781/chr22:1288:chr22:
40391298-40391142:2;4782/chr22:1288:chr22:40391298-40391142:1;4783/chr14:157:chr14:24780336-247801
66:2;4784/chr14:157:chr14:24780336-24780166:1;4785/chr7:4820:chr7:157481795-157481628:2;4786/chr7:48
20:chr7:157481795-157481628:1;4787/chr19:1699:chr19:13215542-13215370:1;4788/chr15:203:chr15:270187
82-27018607:2;4789/chr15:203:chr15:27018782-27018607:1;4790/chr19:2730:chr19:31842757-31842604:2;47
91/chr19:2730:chr19:31842757-31842604:1;4792/chrX:810:chrX:48685429-48685279:2;4793/chrX:810:chrX:48
685429-48685279:1;4794/chr8:565:chr8:8559711-8559586:2;4795/chr8:565:chr8:8559711-8559586:1;4796/chr
1:3709:chr1:41327658-41327484:1;4797/chr5:3347:chr5:175224294-175224159:2;4798/chr5:3347:chr5:175224
294-175224159:1;4799/chr18:1611:chr18:76739950-76739797:2;4800/chr18:1611:chr18:76739950-76739797:1;
4801/chr15:260:chr15:28342123-28341963:2;4802/chr15:260:chr15:28342123-28341963:1;4803/chr3:2641:chr
3:138679545-138679385:2;4804/chr3:2641:chr3:138679545-138679385:1;4805/chr8:1742:chr8:55379618-5537
9458:2;4806/chr8:1742:chr8:55379618-55379458:1;4807/chr7:873:chr7:3341003-3340871:2;4808/chr7:873:chr
7:3341003-3340871:1;4809/chr11:141:chr11:849586-849411:1;4810/chr5:3128:chr5:170847735-170847579:1;4
811/chr20:54:chr20:825581-825407:2;4812/chr20:54:chr20:825581-825407:1;4813/chr4:123:chr4:996790-9966
15:2;4814/chr4:123:chr4:996790-996615:1;4815/chr14:2041:chr14:101925584-101925444:2;4816/chr14:2041:c
hr14:101925584-101925444:1;4817/chr7:735:chr7:2558718-2558588:2;4818/chr7:735:chr7:2558718-2558588:
1;4819/chr22:162:chr22:19711492-19711334:2;4820/cg11430157:chr6:118228898-118228723:2;4821/cg11430
157:chr6:118228898-118228723:1;4822/chr19:56:chr19:519152-518994:2;4823/chr19:56:chr19:519152-518994:
1;4824/chr12:438:chr12:6883150-6883011:2;4825/chr12:438:chr12:6883150-6883011:1;4826/chr11:2512:chr1
1:65553989-65553814:2;4827/chr11:2512:chr11:65553989-65553814:1;4828/chr9:2352:chr9:134430281-13443
0156:2;4829/chr9:2352:chr9:134430281-134430156:1;4830/chr10:3172:chr10:118894486-118894332:2;4831/c
hr10:3172:chr10:118894486-118894332:1;4832/chr22:162:chr22:19711492-19711334:1;4833/chr9:3497:chr9:1
39716364-139716195:1;4834/chr8:37:chr8:687199-687041:2;4835/chr8:37:chr8:687199-687041:1;4836/chr1:30
01:chr1:25255933-25255786:2;4837/chr1:3001:chr1:25255933-25255786:1;4838/chr10:4269:chr10:133110148-
133109994:2;4839/chr10:4269:chr10:133110148-133109994:1;4840/chr7:405:chr7:1276183-1276016:2;4841/c
hr7:405:chr7:1276183-1276016:1;4842/chr14:2166:chr14:103395894-103395765:2;4843/chr14:2166:chr14:103
395894-103395765:1;4844/chr19:3278:chr19:38886523-38886348:2;4845/chr19:3278:chr19:38886523-388863
48:1;4846/chr15:201:chr15:27017457-27017300:2;4847/chr15:201:chr15:27017457-27017300:1;4848/chr1:384
9:chr1:44872770-44872629:2;4849/chr1:3849:chr1:44872770-44872629:1;4850/chr15:628:chr15:41787675-417
87512:2;4851/chr15:628:chr15:41787675-41787512:1;4852/chr1:68:chr1:1007579-1007421:2;4853/chr1:68:chr
1:1007579-1007421:1;4854/chr19:2895:chr19:34113239-34113109:2;4855/chr3:2434:chr3:128764750-1287646
03:2;4856/chr3:2434:chr3:128764750-128764603:1;4857/chr2:1925:chr2:63286452-63286326:2;4858/chr2:192
5:chr2:63286452-63286326:1;4859/chr1:2566:chr1:18434805-18434631:2;4860/chr18:566:chr18:31020655-310
20493:2;4861/chr18:566:chr18:31020655-31020493:1;4862/chr8:651:chr8:10588155-10587983:2;4863/chr8:65
1:chr8:10588155-10587983:1;4864/chr1:2566:chr1:18434805-18434631:1;4865/chr15:2393:chr15:99645328-99
645153:2;4866/chr15:2393:chr15:99645328-99645153:1;4867/chr1:359:chr1:2005334-2005168:2;4868/chr1:35
9:chr1:2005334-2005168:1;4869/chr17:1937:chr17:38473237-38473062:2;4870/chr17:1937:chr17:38473237-38
473062:1;4871/chr10:2309:chr10:88123662-88123490:2;4872/chr10:2309:chr10:88123662-88123490:1;4873/c
hr19:2895:chr19:34113239-34113109:1;4874/chr4:1685:chr4:41869506-41869341:2;4875/chr4:1685:chr4:4186
9506-41869341:1;4876/chr1:1408:chr1:4714460-4714285:2;4877/chr1:1408:chr1:4714460-4714285:1;4878/chr
19:362:chr19:1457182-1457013:2;4879/chr19:362:chr19:1457182-1457013:1;4880/chr4:1277:chr4:8873162-88
72995:2;4881/chr4:1277:chr4:8873162-8872995:1;4882/chr10:801:chr10:17496439-17496267:2;4883/chr10:80
1:chr10:17496439-17496267:1;4884/chr2:3708:chr2:131721307-131721145:2;4885/chr2:3708:chr2:131721307-
131721145:1;4886/chr1:5025:chr1:119532290-119532152:2;4887/chr1:5025:chr1:119532290-119532152:1;488
8/chr2:2227:chr2:74743408-74743272:2;4889/chr13:714:chr13:53421791-53421657:2;4890/chr13:714:chr13:53
421791-53421657:1;4891/chr2:3031:chr2:111877230-111877104:2;4892/chr2:3031:chr2:111877230-11187710
4:1;4893/cg24115221:chr19:12267804-12267629:1;4894/chr13:1196:chr13:110437532-110437368:2;4895/chr1
3:1196:chr13:110437532-110437368:1;4896/chr2:118:chr2:946950-946781:2;4897/chr2:118:chr2:946950-9467
81:1;4898/chr4:2250:chr4:111542405-111542245:2;4899/chr4:2250:chr4:111542405-111542245:1;4900/chr9:1
343:chr9:110250392-110250241:2;4901/chr9:1343:chr9:110250392-110250241:1;4902/chr12:3051:chr12:1303
88203-130388062:2;4903/chr18:105:chr18:5890435-5890264:2;4904/chr6:1651:chr6:43970634-43970468:2;49
05/chr6:1651:chr6:43970634-43970468:1;4906/chr10:1637:chr10:60936875-60936701:1;4907/chr12:3051:chr1
2:130388203-130388062:1;4908/chr18:105:chr18:5890435-5890264:1;4909/chr13:917:chr13:88324765-883246
14:2;4910/chr13:917:chr13:88324765-88324614:1;4911/cg01939274:chr5:127874490-127874330:1;4912/chr20
:765:chr20:26189770-26189621:2;4913/chr20:765:chr20:26189770-26189621:1;4914/chr14:1433:chr14:931538
75-93153720:2;4915/chr14:1433:chr14:93153875-93153720:1;4916/chr4:1578:chr4:30723770-30723607:2;491
7/chr4:1578:chr4:30723770-30723607:1;4918/chr19:4944:chr19:58907723-58907574:2;4919/chr19:4944:chr19:
58907723-58907574:1;4920/chr15:867:chr15:53097635-53097469:2;4921/chr15:867:chr15:53097635-5309746
9:1;4922/chr19:2031:chr19:17439446-17439277:1;4923/chr5:3644:chr5:178003946-178003802:2;4924/chr5:36
44:chr5:178003946-178003802:1;4925/chr13:1702:chr13:113764769-113764604:2;4926/chr13:1702:chr13:113
764769-113764604:1;4927/chr2:2227:chr2:74743408-74743272:1;4928/chr7:1568:chr7:27260422-27260255:2;
4929/chr7:1568:chr7:27260422-27260255:1;4930/chr4:774:chr4:5894776-5894619:2;4931/chr4:774:chr4:58947
76-5894619:1;4932/chr3:2134:chr3:123167101-123166936:2;4933/chr4:1578:chr4:30723902-30723731:2;4934/
chr4:1578:chr4:30723902-30723731:1;4935/chr3:2134:chr3:123167101-123166936:1;4936/chr2:4772:chr2:220
314052-220313898:2;4937/chr9:1073:chr9:96715514-96715350:2;4938/chr9:1073:chr9:96715514-96715350:1;
4939/cg09231862:chr14:29235470-29235306:1;4940/chr2:4772:chr2:220314052-220313898:1;4941/chr18:608:
chr18:34824030-34823862:2;4942/chr12:1090:chr12:50355023-50354892:2;4943/chr12:1090:chr12:50355023-
50354892:1;4944/chr18:608:chr18:34824030-34823862:1;4945/chr12:2890:chr12:127211067-127210910:2;494
6/chr12:2890:chr12:127211067-127210910:1;4947/chr2:1706:chr2:4759697547596826:2;4948/chr2:1706:chr2:
47596975-47596826:1;4949/chrX:1339:chrX:108868486-108868311:2;4950/chrX:1339:chrX:108868486-10886
8311:1;4951/chr11:4678:chr11:130029861-130029713:2;4952/chr11:4678:chr11:130029861-130029713:1;4953/
chr13:368:chr13:28674541-28674389:2;4954/chr13:368:chr13:28674541-28674389:1;4955/chr3:2544:chr3:134
031997-134031826:2;4956/chr3:2544:chr3:134031997-134031826:1;4957/chr1:224:chr1:1475773-1475598:2;4
958/chr1:224:chr1:1475773-1475598:1;4959/chr20:2210:chr20:59828197-59828051:2;4960/chr20:2210:chr20:5
9828197-59828051:1;4961/chr17:1098:chr17:13504849-13504674:2;4962/chr17:1098:chr17:13504849-135046
74:1;4963/chr6:1147:chr6:33245407-33245262:2;4964/chr6:1147:chr6:33245407-33245262:1;4965/chr16:234:c
hr16:1035168-1035008:2;4966/chr16:234:chr16:1035168-1035008:1;4967/chr9:1081:chr9:96721611-96721438:
2;4968/chr9:1081:chr9:96721611-96721438:1;4969/chr19:2725:chr19:31839668-31839505:2;4970/chr19:2725:
chr19:31839668-31839505:1;4971/chr3:2770:chr3:147128533-147128358:2;4972/chr3:2770:chr3:147128533-1
47128358:1;4973/chr20:2210:chr20:59827213-59827085:2;4974/chr20:2210:chr20:59827213-59827085:1;4975/
chr6:99:chr6:1384388-1384228:2;4976/chr6:99:chr6:1384388-1384228:1;4977/chr14:454:chr14:48144340-481
44169:2;4978/chr14:454:chr14:48144340-48144169:1;4979/chr17:2301:chr17:45500937-45500762:2;4980/chr1
7:2301:chr17:45500937-45500762:1;4981/chr2:2852:chr2:107503158-107502987:2;4982/chr2:2852:chr2:10750
3158-107502987:1;4983/chr19:1946:chr19:16436536-16436381:2;4984/chr19:1946:chr19:16436536-16436381:
1;4985/chr8:1309:chr8:35093114-35092970:2;4986/chr8:1309:chr8:35093114-35092970:1;4987/chr11:98:chr11:
627499-627331:2;4988/chr11:98:chr11:627499-627331:1;4989/chr22:2210:chr22:48972735-48972562:2;4990/
chr7:873:chr7:3341078-3340952:2;4991/chr7:873:chr7:3341078-3340952:1;4992/chr22:2210:chr22:48972735-4
8972562:1;4993/chr12:1460:chr12:58130245-58130113:1;4994/chr7:1536:chr7:27205963-27205792:2;4995/chr
17:2190:chr17:43198610-43198469:2;4996/chr17:2190:chr17:43198610-43198469:1;4997/chr8:1716:chr8:5478
9885-54789710:2;4998/chr8:1716:chr8:54789885-54789710:1;4999/chr7:1536:chr7:27205963-27205792:1;500
0/chr17:1218:chr17:17399510-17399341:2;5001/chr17:1218:chr17:17399510-17399341:1;5002/chr6:380:chr6:1
0382217-10382080:2;5003/chr12:2984:chr12:129338259-129338114:2;5004/chr12:2984:chr12:129338259-129
338114:1;5005/chr6:380:chr6:10382217-10382080:1;5006/chr17:276:chr17:1961174-1961001:2;5007/chr17:27
6:chr17:1961174-1961001:1;5008/chr1:5019:chr1:119527190-119527022:1;5009/chr2:4191:chr2:175205431-17
5205257:2;5010/chr2:4191:chr2:175205431-175205257:1;5011/chr4:1727:chr4:44450459-44450285:2;5012/chr
15:207:chr15:27112514-27112369:2;5013/chr15:207:chr15:27112514-27112369:1;5014/chr5:3993:chr5:180486
476-180486301:2;5015/chr5:3993:chr5:180486476-180486301:1;5016/chr4:1727:chr4:4445045944450285:1;5
017/chr22:2676:chr22:50496898-50496727:2;5018/chr22:2676:chr22:50496898-50496727:1;5019/chr16:74:chr
16:610719-610546:2;5020/chr16:74:chr16:610719-610546:1;5021/chr6:107:chr6:1393843-1393708:2;5022/chr6:
107:chr6:1393843-1393708:1;5023/chr9:1878:chr9:129377608-129377444:2;5024/chr9:1878:chr9:129377608-
129377444:1;5025/chr3:3168:chr3:184301702-184301573:2;5026/chr3:3168:chr3:184301702-184301573:1;502
7/chr8:2717:chr8:139509239-139509073:2;5028/chr8:2717:chr8:139509239-139509073:1;5029/chrX:1761:chrX:
151143025-151142878:2;5030/chrX:1761:chrX:151143025-151142878:1;5031/chr12:3094:chr12:130646795-1
30646628:2;5032/chr12:3094:chr12:130646795-130646628:1;5033/chr16:3585:chr16:85320785-85320612:2;50
34/chr16:3585:chr16:85320785-85320612:1;5035/chr13:289:chr13:26626263-26626088:1;5036/chr10:2761:chr
10:102987065-102986897:2;5037/chr10:2761:chr10:102987065-102986897:1;5038/chr6:2396:chr6:117869487-
117869358:1;5039/chr12:3097:chr12:130648115-130647973:2;5040/chr12:3097:chr12:130648115-130647973:
1;5041/chr5:705:chr5:2751322-2751197:2;5042/chr5:705:chr5:2751322-2751197:1;5043/chr9:3136:chr9:13860
6462-138606291:2;5044/chr9:3136:chr9:138606462-138606291:1;5045/chr6:1567:chr6:42072269-42072127:2;
5046/chr6:1567:chr6:42072269-42072127:1;5047/chr19:368:chr19:1469993-1469823:2;5048/chr19:368:chr19:1
469993-1469823:1;5049/chr14:2038:chr14:101923723-101923592:2;5050/chr14:2038:chr14:101923723-10192
3592:1;5051/chr5:1725:chr5:72732733-72732563:2;5052/chr5:1725:chr5:72732733-72732563:1;5053/chr5:204
8:chr5:112539175-112539000:1;5054/chr7:1422:chr7:25892704-25892570:1;5055/chr6:384:chr6:10385214-103
85039:1;5056/chr16:825:chr16:3550241-3550067:1;5057/chr1:3856:chr1:44883530-44883355:2;5058/chr1:385
6:chr1:44883530-44883355:1;5059/chr1:3953:chr1:47899983-47899857:2;5060/chr1:3953:chr1:47899983-4789
9857:1;5061/chr7:1908:chr7:39649358-39649183:2;5062/chr4:1288:chr4:8895032-8894859:1;5063/chr14:397:c
hr14:38091702-38091567:2;5064/chr14:397:chr14:38091702-38091567:1;5065/chr2:4784:chr2:220361610-220
361435:2;5066/chr2:4784:chr2:220361610-220361435:1;5067/chr2:4245:chr2:176981383-176981210:2;5068/c
hr2:4245:chr2:176981383-176981210:1;5069/chr18:280:chr18:11751833-11751658:2;5070/chr19:4653:chr19:5
5598405-55598269:2:5071/chr19:4653:chr19:55598405-55598269:1;5072/chr22:15:chr22:17083238-17083064:
2;5073/chr22:15:chr22:17083238-17083064:1;5074/chr10:3406:chr10:123923438-123923267:2;5075/chr10:340
6:chr10:123923438-123923267:1;5076/chr15:634:chr15:41795310-41795135:2;5077/chr15:634:chr15:4179531
0-41795135:1;5078/chr12:1321:chr12:54428617-54428443:2;5079/chr12:1321:chr12:54428617-54428443:1;50
80/chr13:45:chr13:20176198-20176064:2;5081/chr13:45:chr13:20176198-20176064:1;5082/chr18:280:chr18:11
751833-11751658:1;5083/chr4:207:chr4:1400658-1400488:2;5084/chr4:207:chr4:1400658-1400488:1;5085/chr
2:3447:chr2:127414109-127413935:1;5086/chr15:935:chr15:58357378-58357203:1;5087/chr7:4539:chr7:15558
0257-155580082:2;5088/chr7:4539:chr7:155580257-155580082:1;5089/chr5:1789:chr5:76373779-76373648:2;
5090/chr5:1789:chr5:76373779-76373648:1;5091/chr10:2140:chr10:81002973-81002834:2;5092/chr10:2140:ch
r10:81002973-81002834:1;5093/chr7:2162:chr7:50343573-50343428:2;5094/chr7:2162:chr7:50343573-503434
28:1;5095/chr7:1908:chr7:39649358-39649183:1;5096/chr8:766:chr8:12809098-12808967:2;5097/chr8:766:chr
8:12809098-12808967:1;5098/chr6:21:chr6:392493-392340:2;5099/chr6:21:chr6:392493-392340:1;5100/chr17:
1003:chr17:11144167-11144024:1;5101/chr16:4109:chr16:88497153-88497023:2;5102/chr16:4109:chr16:8849
7153-88497023:1;5103/chr19:3497:chr19:41106268-41106143:2;5104/chr19:3497:chr19:41106268-41106143:1;
5105/chr8:791:chr8:15397882-15397749:2;5106/chr8:791:chr8:15397882-15397749:1;5107/chr19:1696:chr19:
13210368-13210193:2;5108/chr19:1696:chr19:13210368-13210193:1;5109/chr10:3406:chr10:123923024-1239
22851:1;5110/chr12:2890:chr12:127211222-127211048:2;5111/chr12:2890:chr12:127211222-127211048:1;511
2/chr17:550:chr17:4981877-4981752:2;5113/chr17:550:chr17:4981877-4981752:1;5114/chr8:3759:chr8:145698
233-145698086:2;5115/chr8:3759:chr8:145698233-145698086:1;5116/chr2:3107:chr2:115919305-115919132:2;
5117/chr2:3107:chr2:115919305-115919132:1;5118/chr7:4817:chr7:157478108-157477978:2;5119/chr7:4817:
chr7:157478108-157477978:1;5120/chr6:458:chr6:12750116-12749942:2;5121/chr6:458:chr6:12750116-12749
942:1;5122/chr20:516:chr20:21082095-21081964:2;5123/chr20:516:chr20:21082095-21081964:1;5124/chr17:2
750:chr17:56565024-56564849:2:5125/chr17:2750:chr17:56565024-56564849:1;5126/chr4:2084:chr4:8541914
5-85419019:2;5127/chr4:2084:chr4:85419145-85419019:1;5128/chr19:4173:chr19:50393886-50393711:2;5129/
chr6:2842:chr6:157557665-157557498:2;5130/chr6:2842:chr6:157557665-157557498:1;5131/chr4:637:chr4:37
69422-3769249:2;5132/chr4:637:chr4:3769422-3769249:1;5133/chr13:699:chr13:53174626-53174459:2;5134/c
hr13:699:chr13:53174626-53174459:1;5135/chr17:4140:chr17:77789784-77789613:2:5136/chr17:4140:chr17:7
7789784-77789613:1;5137/chr13:341:chr13:28498448-28498275:2;5138/chr17:4130:chr17:77776730-7777655
5:2;5139/chr17:4130:chr17:77776730-77776555:1;5140/chr5:1949:chr5:92940104-92939930:2;5141/chr5:1949:
chr5:92940104-92939930:1;5142/chr14:1947:chr14:101193429-101193256:2;5143/chr5:506:chr5:1882419-188
2244:1;5144/chr6:1534:chr6:4151610541515930:2;5145/chr6:1534:chr6:4151610541515930:1;5146/chr22:18
52:chr22:46476100-46475974:2;5147/chr22:1852:chr22:46476100-46475974:1;5148/chr3:1154:chr3:48693870-
48693701:2;5149/chr3:1154:chr3:48693870-48693701:1;5150/chr1:3849:chr1:44872886-44872716:1;5151/chr2:
117:chr2:946294-946125:1;5152/chr10:4449:chr10:133999386-133999214:1;5153/chr16:4191:chr16:88701006-
88700876:2:5154/chr16:4191:chr16:88701006-88700876:1;5155/chr7:1497:chr7:27155388-27155256:2;5156/c
hr7:1497:chr7:27155388-27155256:1;5157/chr5:705:chr5:2751267-2751092:2;5158/chr5:705:chr5:2751267-27
51092:1;5159/chr20:2983:chr20:62369570-62369427:1;5160/chr10:3406:chr10:123923081-123922956:2:5161/
chr10:3406:chr10:123923081-123922956:1;5162/chr14:312:chr14:36973320-36973145:2;5163/chr14:312:chr14:
36973320-36973145:1;5164/chr7:4691:chr7:156796818-156796643:2:5165/chr7:4691:chr7:156796818-156796
643:1;5166/chr19:1881:chr19:15580732-15580557:2;5167/chr19:1881:chr19:15580732-15580557:1;5168/chr10:
3171:chr10:118893967-118893793:2;5169/chr10:3171:chr10:118893967-118893793:1:5170/chr3:431:chr3:135
90906-13590731:2;5171/chr3:431:chr3:13590906-13590731:1;5172/chr7:2589:chr7:70597337-70597185:2;517
3/chr7:2589:chr7:70597337-70597185:1:5174/chr6:86:chr6:1312516-1312343:2;5175/chr6:86:chr6:1312516-13
12343:1;5176/chr6:2842:chr6:157557913-157557740:2;5177/chr6:2842:chr6:157557913-157557740:1;5178/chr
19:4173:chr19:50393886-50393711:1;5179/chr13:917:chr13:88325013-88324882:2;5180/chr13:917:chr13:8832
5013-88324882:1;5181/chr9:1226:chr9:100616551-100616376:2;5182/chr9:1226:chr9:100616551-100616376:1;
5183/chr13:341:chr13:28498448-28498275:1;5184/chr5:705:chr5:2751744-2751576:2;5185/chr5:705:chr5:275
1744-2751576:1;5186/chr22:2727:chr22:50738088-50737947:2;5187/chr22:2727:chr22:50738088-50737947:1;
5188/chr1:1852:chr1:8277618-8277493:2;5189/chr1:1852:chr1:8277618-8277493:1;5190/chr10:906:chr10:2348
1221-23481092:2;5191/chr10:906:chr10:23481221-23481092:1;5192/chr2:5862:chr2:242498304-242498177:2;
5193/chr2:5862:chr2:242498304-242498177:1;5194/chr14:1947:chr14:101193429-101193256:1;5195/chr11:10
79:chr11:6651602-6651428:2;5196/chr11:1079:chr11:6651602-6651428:1;5197/chr12:1321:chr12:54428791-54
428617:2;5198/chr12:1321:chr12:54428791-54428617:1;5199/chrX:1560:chrX:133684982-133684808:1;5200/c
hr1:3851:chr1:44873255-44873082:2;5201/chr1:3851:chr1:44873255-44873082:1;5202/chr2:4214:chr2:176944
944-176944769:2;5203/chr2:4214:chr2:176944944-176944769:1;5204/chr2:1902:chr2:63275143-63275012:2;5
205/chr2:1902:chr2:63275143-63275012:1;5206/chr18:105:chr18:5890930-5890796:2;5207/chr18:105:chr18:58
90930-5890796:1;5208/chr5:3119:chr5:170737324-170737149:2;5209/chr17:1098:chr17:13504921-13504746:2;
5210/chr17:1098:chr17:13504921-13504746:1;5211/chr2:1181:chr2:24233170-24233045:2;5212/chr2:1181:chr
2:24233170-24233045:1;5213/chr12:1319:chr12:54427781-54427637:1;5214/chr17:1814:chr17:35300356-3530
0222:2;5215/chr17:1814:chr17:35300356-35300222:1;5216/chr5:3119:chr5:170737324-170737149:1;5217/chr1
2:1084:chr12:50297660-50297510:1;5218/chr7:3112:chr7:100091322-100091176:2;5219/chr7:547:chr7:157702
9-1576903:2;5220/chr7:547:chr7:1577029-1576903:1;5221/chr19:2032:chr19:17439780-17439654:1;5222/chr7:
3112:chr7:100091322-100091176:1;5223/chr22:1248:chr22:40058309-40058177:2;5224/chr22:1248:chr22:400
58309-40058177:1;5225/chr18:891:chr18:47795096-47794921:1;5226/chr15:1477:chr15:75248867-75248694:2;
5227/chr15:1477:chr15:75248867-75248694:1;5228/chr12:3052:chr12:130389012-130388837:1;5229/chr1:395
7:chr1:47905373-47905230:2;5230/chr1:3957:chr1:47905373-47905230:1;5231/chr19:553:chr19:2252169-2251
996:2;5232/chr19:553:chr19:2252169-2251996:1;5233/chr3:160:chr3:9595467-9595324:2;5234/chr3:160:chr3:9
595467-9595324:1;5235/chr19:2031:chr19:17439119-17438991:2;5236/chr19:2031:chr19:17439119-17438991:
1;5237/chr9:47:chr9:976769-976594:2;5238/chr9:47:chr9:976769-976594:1;5239/chr13:452:chr13:31480794-31
480644:2;5240/chr13:452:chr13:31480794-31480644:1;5241/chr2:3108:chr2:115919599-115919444:2;5242/chr
2:3108:chr2:115919599-115919444:1;5243/chr1:7412:chr1:248021052-248020917:2;5244/chr1:7412:chr1:2480
21052-248020917:1;5245/chr8:1720:chr8:54792258-54792133:1;5246/chr2:4217:chr2:176947321-176947190:1;
5247/chr3:3063:chr3:179755035-179754866:2;5248/chr3:3063:chr3:179755035-179754866:1;5249/chr3:2382:
chr3:128210984-128210811:2;5250/chr3:2382:chr3:128210984-128210811:1;5251/chr7:3501:chr7:127671733-
127671605:2;5252/chr7:3501:chr7:127671733-127671605:1;5253/chr15:937:chr15:58358020-58357871:2;5254/
chr15:937:chr15:58358020-58357871:1;5255/chr14:1032:chr14:75078378-75078215:2;5256/chr14:1032:chr14:
75078378-75078215:1;5257/chr1:645:chr1:2706747-2706579:2;5258/chr1:645:chr1:2706747-2706579:1;5259/c
hr14:1600:chr14:95826920-95826747:2;5260/chr14:1600:chr14:95826920-95826747:1;5261/chr19:3999:chr19:
48946952-48946809:2;5262/chr19:3999:chr19:48946952-48946809:1;5263/chr2:3075:chr2:114035278-114035
108:2;5264/chr2:3075:chr2:114035278-114035108:1;5265/chr4:1487:chr4:21950629-21950473:2;5266/chr4:14
87:chr4:21950629-21950473:1;5267/chr14:986:chr14:73958477-73958311:2;5268/chr14:986:chr14:73958477-7
3958311:1;5269/chr1:3851:chr1:44873540-44873376:2;5270/chr1:3851:chr1:44873540-44873376:1;5271/chr3:
2383:chr3:128211406-128211240:2;5272/chr3:2383:chr3:128211406-128211240:1;5273/chr17:3502:chr17:737
49852-73749685:2;5274/chr17:3502:chr17:73749852-73749685:1;5275/chr22:14:chr22:17082595-17082432:2;
5276/chr22:14:chr22:17082595-17082432:1;5277/chr21:666:chr21:44037292-44037121:1;5278/chr5:2324:chr5:
134363570-134363445:2;5279/chr5:2324:chr5:134363570-134363445:1;5280/chr9:3497:chr9:139716121-1397
15964:2;5281/chr9:3497:chr9:139716121-139715964:1;5282/chr5:504:chr5:1878738-1878612:2;5283/chr5:504:
chr5:1878738-1878612:1;5284/chr1:7249:chr1:240256188-240256063:2;5285/chr1:7249:chr1:240256188-2402
56063:1;5286/chrX:678:chrX:39949450-39949303:2;5287/chrX:678:chrX:39949450-39949303:1;5288/chr9:948:
chr9:94712148-94711994:2;5289/chr5:3837:chr5:178957607-178957432:2;5290/chr5:3837:chr5:178957607-17
8957432:1;5291/chr20:946:chr20:32857247-32857102:1;5292/chr9:948:chr9:94712148-94711994:1;5293/chr8:
1720:chr8:54792139-54791967:2;5294/chr8:1720:chr8:54792139-54791967:1;5295/chr10:4270:chr10:1331105
09-133110378:2;5296/chr10:4270:chr10:133110509-133110378:1;5297/chr14:2219:chr14:103739908-1037397
47:2;5298/chr14:2219:chr14:103739908-103739747:1;5299/chr11:3411:chr11:74952774-74952632:2;5300/chr1
1:3411:chr1174952774-74952632:1;5301/chr11:4527:chr11:126286483-126286358:2;5302/chr11:4527:chr11:1
26286483-126286358:1;5303/chr22:1852:chr22:46476252-46476094:2;5304/chr22:1852:chr22:46476252-4647
6094:1;5305/chrX:27:chrX:334621-334496:2;5306/chrX:27:chrX:334621-334496:1;5307/chrX:693:chrX:400051
32-40004973:2;5308/chrX:693:chrX:40005132-40004973:1;5309/chr4:2716:chr4:174430804-174430631:2;5310/
chr4:2716:chr4:174430804-174430631:1;5311/chr18:91:chr18:5543341-5543178:2;5312/chr18:91:chr18:55433
41-5543178:1;5313/chr5:504:chr5:1878925-1878799:2;5314/chr5:504:chr5:1878925-1878799:1;5315/chr8:1878:
chr8:65282803-65282628:2;5316/chr8:594:chr8:9764211-9764047:2;5317/chr8:594:chr8:9764211-9764047:1;5
318/chr8:1878:chr8:65282803-65282628:1;5319/chr20:524:chr20:21376757-21376620:2;5320/chr20:524:chr20:
21376757-21376620:1;5321/chr22:1823:chr22:46368222-46368053:2;5322/chr22:1823:chr22:46368222-46368
053:1;5323/chr13:699:chr13:53174743-53174614:1;5324/chr5:3113:chr5:170289224-170289073:2;5325/chr5:3
113:chr5:170289224-170289073:1;5326/chr9:1073:chr9:96715573-96715419:2;5327/chr9:1073:chr9:96715573-
96715419:1;5328/chr19:1987:chr19:17008857-17008683:2;5329/chr19:1987:chr19:17008857-17008683:1;5330/
chr13:1076:chr13:100641563-100641438:1;5331/chr4:1481:chr4:20256796-20256625:2;5332/chr4:1481:chr4:2
0256796-20256625:1;5333/chr20:134:chr20:2673116-2672991:2;5334/chr20:134:chr20:2673116-2672991:1;53
35/chr5:3298:chr5:174159022-174158853:2;5336/chr5:3298:chr5:174159022-174158853:1;5337/chr16:110:chr
16:744579-744436:2;5338/chr16:110:chr16:744579-744436:1;5339/chr12:1523:chr12:65219000-65218840:2;53
40/chr12:1523:chr12:65219000-65218840:1;5341/chr2:4215:chr2:176945653-176945526:2;5342/chr2:4215:chr
2:176945653-176945526:1;5343/chr17:1003:chr17:11144841-11144714:2;5344/chr17:1003:chr17:11144841-11
144714:1;5345/chr5:2324:chr5:134363847-134363677:2;5346/chr5:2324:chr5:134363847-134363677:1;5347/c
hr19:3503:chr19:41119623-41119462:2;5348/chr19:3503:chr19:41119623-41119462:1;5349/chr5:1718:chr5:72
677608-72677479:2;5350/chr5:1718:chr5:72677608-72677479:1;5351/chr8:3759:chr8:145698410-145698258:2;
5352/chr8:3759:chr8:145698410-145698258:1;5353/chr19:4944:chr19:58908421-58908285:2;5354/chr19:4944:
chr19:58908421-58908285:1;5355/chr16:756:chr16:3017179-3017027:2;5356/chr9:2443:chr9:135462360-1354
62199:2;5357/chr9:2443:chr9:135462360-135462199:1;5358/chr13:874:chr13:79177791-79177622:2;5359/chr1
3:874:chr13:79177791-79177622:1;5360/chr9:1715:chr9:126780359-126780185:2;5361/chr9:1715:chr9:126780
359-126780185:1;5362/chr7:3412:chr7:113727785-113727612:2;5363/chr7:3412:chr7:113727785-113727612:1;
5364/chr9:1682:chr9:126135674-126135511:2;5365/chr9:1682:chr9:126135674-126135511:1;5366/chr1:7249:
chr1:240256616-240256443:2;5367/chr10:861:chr10:22542464-22542294:2;5368/chr10:861:chr10:22542464-2
2542294:1;5369/chr1:7249:chr1:240256616-240256443:1;5370/chr15:2252:chr15:95388255-95388088:2;5371/
chr15:2252:chr15:95388255-95388088:1;5372/chr18:610:chr18:34833717-34833542:2;5373/chr18:610:chr18:3
4833717-34833542:1;5374/chr2:4252:chr2:176987935-176987797:2;5375/chr2:4252:chr2:176987935-1769877
97:1;5376/chr19:830:chr19:3786494-3786349:2;5377/chr19:830:chr19:3786494-3786349:1;5378/chr11:2301:ch
r11:63768200-63768040:2;5379/chr11:2301:chr11:63768200-63768040:1;5380/chr2:597:chr2:5832344-583219
7:2;5381/chr2:597:chr2:5832344-5832197:1;5382/chr13:1471:chr13:112758896-112758729:2;5383/chr13:1471:
chr13:112758896-112758729:1;5384/chr16:756:chr16:3017179-3017027:1;5385/chr4:5:chr4:107740-107572:2;
5386/chr4:5:chr4:107740-107572:1;5387/chr14:164:chr14:24804200-24804029:2;5388/chr14:164:chr14:248042
00-24804029:1;5389/chr11:2667:chr11:67290900-67290774:2;5390/chr10:2140:chr10:81003591-81003466:2;5
391/chr10:2140:chr10:81003591-81003466:1;5392/chr11:2667:chr11:67290900-67290774:1;5393/chr8:2717:ch
r8:139509372-139509235:2;5394/chr8:2717:chr8:139509372-139509235:1;5395/chr6:279:chr6:6004190-60040
64:2;5396/chr6:279:chr6:6004190-6004064:1;5397/chr3:1010:chr3:45187643-45187472:2;5398/chr3:1010:chr3:
45187643-45187472:1;5399/chr13:1456:chr13:112721373-112721238:2;5400/chr13:1456:chr13:112721373-11
2721238:1;5401/chr3:649:chr3:22414339-22414212:2;5402/chr3:649:chr3:22414339-22414212:1;5403/chr16:3
821:chr16:86542194-86542027:2;5404/chr16:3821:chr16:86542194-86542027:1;5405/chr11:2279:chr11:63530
682-63530552:2;5406/chr11:2279:chr11:63530682-63530552:1;5407/chr1:3435:chr1:34642803-34642634:2;54
08/chr8:1309:chr8:35092835-35092697:2;5409/chr8:1309:chr8:35092835-35092697:1;5410/chr1:3435:chr1:346
42803-34642634:1;5411/chr10:583:chr10:11059819-11059656:2;5412/chr10:583:chr10:11059819-11059656:1;
5413/chr2:4214:chr2:176945230-176945060:2;5414/chr2:4214:chr2:176945230-176945060:1;5415/chr3:2518:c
hr3:133393345-133393194:2;5416/chr10:629:chr10:11784863-11784721:2;5417/chr10:629:chr10:11784863-11
784721:1;5418/chr3:2518:chr3:133393345-133393194:1;5419/chr7:727:chr7:2539938-2539765:2;5420/chr7:72
7:chr7:2539938-2539765:1;5421/chr11:716:chr11:2291738-2291563:2;5422/chr11:716:chr11:2291738-2291563:
1;5423/chr17:4657:chr17:80332974-80332803:2;5424/chr17:4657:chr17:80332974-80332803:1;5425/chr7:415
3:chr7:150811879-150811754:2;5426/chr7:4153:chr7:150811879-150811754:1;5427/chr6:1938:chr6:79620476-
79620301:2;5428/chr6:1938:chr6:79620476-79620301:1;5429/chr19:367:chr19:1467728-1467567:2;5430/chr19:
367:chr19:1467728-1467567:1;5431/chr2:1230:chr2:25500461-25500292:2;5432/chr2:1230:chr2:25500461-25
500292:1;5433/chr12:1463:chr12:58132114-58131969:2;5434/chr12:1463:chr12:58132114-58131969:1;5435/c
hr22:2205:chr22:4897112848970969:2;5436/chr22:2205:chr22:48971128-48970969:1;5437/chr4:2647:chr4:16
4265281-164265134:2;5438/chr4:2647:chr4:164265281-164265134:1;5439/chr13:1196:chr13:110437296-1104
37128:2;5440/chr13:1196:chr13:110437296-110437128:1;5441/chr2:4772:chr2:220313440-220313299:2;5442/
chr2:4772:chr2:220313440-220313299:1;5443/chr4:774:chr4:5894672-5894541:2;5444/chr4:774:chr4:5894672-
5894541:1;5445/chr22:2210:chr22:48972853-48972678:2;5446/chr8:1408:chr8:38965081-38964934:1;5447/chr
8:3701:chr8:145104091-145103917:2;5448/chr8:3701:chr8:145104091-145103917:1;5449/chr6:2232:chr6:1079
56061-107955917:2;5450/chr6:2232:chr6:107956061-107955917:1;5451/chr7:3500:chr7:127671355-12767122
9:2;5452/chr7:3500:chr7:127671355-127671229:1;5453/chr13:657:chr13:49795205-49795039:2;5454/chr1:431
3:chr1:60280719-60280554:2;5455/chr1:4313:chr1:60280719-60280554:1;5456/chr3:2471:chr3:129693700-129
693568:2;5457/chr7:4146:chr7:150778613-150778446:2;5458/chr7:4146:chr7:150778613-150778446:1;5459/c
hr16:2915:chr16:67918835-67918666:2;5460/chr22:1865:chr22:46484808-46484636:2;5461/chr22:1865:chr22:
46484808-46484636:1;5462/chr4:1727:chr4:44450517-44450343:2;5463/chr11:1214:chr11:13032129-1303196
7:1;5464/chr12:1523:chr12:65218784-65218610:2;5465/chr12:1523:chr12:65218784-65218610:1;5466/chr4:15
78:chr4:30723658-30723532:2;5467/chr4:1578:chr4:30723658-30723532:1;5468/chr15:1553:chr15:76635273-7
6635098:2;5469/chr15:1553:chr15:76635273-76635098:1;5470/chr8:791:chr8:15398047-15397872:2;5471/chr8:
791:chr8:15398047-15397872:1;5472/chr4:1727:chr4:44450517-44450343:1;5473/chr6:256:chr6:5086441-508
6294:2;5474/chr6:256:chr6:5086441-5086294:1;5475/chr9:1070:chr9:96714322-96714197:2;5476/chr9:1070:ch
r9:96714322-96714197:1;5477/chr2:4784:chr2:220361507-220361382:2;5478/chr2:4784:chr2:220361507-2203
61382:1;5479/chr12:156:chr12:2800605-2800437:2;5480/chr12:156:chr12:2800605-2800437:1;5481/chr18:163
3:chr18:76829012-76828885:2;5482/chr18:1633:chr18:76829012-76828885:1;5483/chr1:7249:chr1:240256486-
240256337:2;5484/chr1:7249:chr1:240256486-240256337:1;5485/chr3:2471:chr3:129693700-129693568:1;548
6/chr16:2915:chr16:67918835-67918666:1;5487/chr9:3508:chr9:139740919-139740779:2;5488/chr9:3508:chr9:
139740919-139740779:1;5489/chr5:2252:chr5:132150172-132150039:2;5490/chr5:2252:chr5:132150172-1321
50039:1;5491/chr10:2140:chr10:81003378-81003209:2;5492/chr10:2140:chr10:81003378-81003209:1;5493/chr
6:95:chr6:1378528-1378401:2;5494/chr6:95:chr6:1378528-1378401:1;5495/chr4:123:chr4:996842-996711:2;54
96/chr4:123:chr4:996842-996711:1;5497/chr4:2084:chr4:85418842-85418683:2;5498/chr4:2084:chr4:85418842-
85418683:1;5499/chr17:3502:chr17:73750135-73749961:2;5500/chr6:1567:chr6:42072583-42072412:2;5501/c
hr6:1567:chr6:42072583-42072412:1;5502/chr2:1230:chr2:25500083-25499935:1;5503/chr17:3502:chr17:7375
0135-73749961:1;5504/chr22:1894:chr22:46659087-46658953:2;5505/chr22:1894:chr22:46659087-46658953:1;
5506/chr19:372:chr19:1471096-1470952:2;5507/chr19:372:chr19:1471096-1470952:1;5508/chr19:2257:chr19:
19335978-19335806:2;5509/chr19:2257:chr19:19335978-19335806:1;5510/chr20:136:chr20:2674487-2674323:
2;5511/chr20:136:chr20:2674487-2674323:1;5512/chr5:3993:chr5:180486615-180486467:2;5513/chr10:1587:c
hr10:52178053-52177922:2;5514/chr10:1587:chr10:52178053-52177922:1;5515/chr5:3993:chr5:180486615-18
0486467:1;5516/chr22:2210:chr22:48972509-48972381:2;5517/chr22:2210:chr22:48972509-48972381:1;5518/
chr12:1321:chr12:54428459-54428298:2;5519/chr12:1321:chr12:54428459-54428298:1;5520/chr22:2210:chr22:
48972853-48972678:1;5521/chr9:948:chr9:94712231-94712062:2;5522/chr9:948:chr9:94712231-94712062:1;5
523/chr15:982:chr15:60296746-60296613:2;5524/chr15:982:chr15:60296746-60296613:1;5525/chr13:657:chr1
3:49795205-49795039:1;5526/chr3:393:chr3:13324475-13324326:2;5527/chr3:393:chr3:13324475-13324326:1;
5528/chr11:3411:chr11:74952901-74952729:2;5529/chr11:3411:chr11:74952901-74952729:1;5530/chr15:753:c
hr15:45479850-45479695:2;5531/chr15:753:chr15:45479850-45479695:1;5532/chr17:2514:chr17:48194870-48
194744:2;5533/chr17:2514:chr17:48194870-48194744:1;5534/chr2:3916:chr2:154335137-154334996:2;5535/c
hr2:3916:chr2:154335137-154334996:1;5536/chr16:3825:chr16:86544916-86544742:2;5537/chr16:3825:chr16:
86544916-86544742:1;5538/chr3:2641:chr3:138679318-138679193:2;5539/chr3:2641:chr3:138679318-138679
193:1;5540/chr1:68:chr1:1007483-1007340:2;5541/chr1:68:chr1:1007483-1007340:1;5542/chr19:551:chr19:225
1545-2251370:2;5543/chr19:551:chr19:2251545-2251370:1;5544/chr11:2420:chr11:64428464-64428291:2;554
5/chr11:2420:chr11:64428464-64428291:1;5546/chr2:3916:chr2:154335020-154334845:2;5547/chr2:3916:chr2:
154335020-154334845:1;5548/chr8:809:chr8:17271061-17270911:2;5549/chr8:809:chr8:17271061-17270911:1;
5550/chr19:1696:chr19:13209854-13209703:2;5551/chr19:1696:chr19:13209854-13209703:1;5552/chr7:1491:
chr7:27153235-27153110:2;5553/chr7:1491:chr7:27153235-27153110:1;5554/chr15:2252:chr15:95388328-953
88168:2;5555/chr15:2252:chr15:95388328-95388168:1;5556/chr7:4153:chr7:150812676-150812548:2;5557/chr
7:4153:chr7:150812676-150812548:1;5558/chr2:741:chr2:8816991-8816821:2;5559/chr2:741:chr2:8816991-88
16821:1;5560/chr6:920:chr6:30039293-30039121:2;5561/chr6:920:chr6:30039293-30039121:1;5562/chr10:270
0:chr10:102587763-102587599:2;5563/chr10:2700:chr10:102587763-102587599:1;5564/chr6:279:chr6:600395
3-6003785:2;5565/chr6:279:chr6:6003953-6003785:1;5566/chr2:2749:chr2:105459466-105459295:2;5567/chr2:
2749:chr2:105459466-105459295:1;5568/chr19:298:chr19:1257140-1256974:2;5569/chr19:298:chr19:1257140-
1256974:1;5570/chr14:2041:chr14:101925470-101925345:2;5571/chr14:2041:chr14:101925470-101925345:1;5
572/chr9:2223:chr9:133540306-133540144:2;5573/chr9:2223:chr9:133540306-133540144:1;5574/chr17:270:ch
r17:1958979-1958835:2;5575/chr17:270:chr17:1958979-1958835:1;5576/chr3:3077:chr3:181413485-18141336
0:2;5577/chr3:3077:chr3:181413485-181413360:1;5578/chr7:1533:chr7:27205022-27204847:2;5579/chr7:1533:
chr7:27205022-27204847:1;5580/chr2:4262:chr2:176995118-176994971:2;5581/chr2:4262:chr2:176995118-17
6994971:1;5582/chr1:604:chr1:2461877-2461732:2;5583/chr1:604:chr1:2461877-2461732:1;5584/chr17:2173:c
hr17:43037477-43037308:2;5585/chr17:2173:chr17:43037477-43037308:1;5586/chr5:3644:chr5:178004014-17
8003841:2;5587/chr5:3644:chr5:178004014-178003841:1;5588/chr18:97:chr18:5630216-5630088:2;5589/chr18:
97:chr18:5630216-5630088:1;5590/chr5:2195:chr5:127873613-127873456:2;5591/chr6:95:chr6:1379195-1379
023:2;5592/chr9:58:chr9:1050317-1050143:2;5593/chr9:58:chr9:1050317-1050143:1;5594/chr8:2251:chr8:9998
6186-99986014:2;5595/chr8:2251:chr8:99986186-99986014:1;5596/chr11:716:chr11:2291863-2291733:2;5597/
chr11:716:chr11:2291863-2291733:1;5598/chr8:656:chr8:10590357-10590187:2;5599/chr8:656:chr8:10590357-
10590187:1;5600/chr15:2501:chr15:101513808-101513644:2;5601/chr15:2501:chr15:101513808-101513644:1;
5602/chr9:2786:chr9:137348062-137347894:2;5603/chr9:2786:chr9:137348062-137347894:1;5604/chr5:3119:c
hr5:170737150-170736991:2;5605/chr5:3119:chr5:170737150-170736991:1;5606/chr5:2195:chr5:127873613-1
27873456:1;5607/chr6:95:chr6:1379195-1379023:1;5608/chr5:2324:chr5:134363772-134363647:2;5609/chr5:2
324:chr5:134363772-134363647:1;5610/chr13:1053:chr13:100548537-100548372:2;5611/chr13:1053:chr13:10
0548537-100548372:1;5612/chr13:1076:chr13:100641969-100641838:2;5613/chr13:1076:chr13:100641969-10
0641838:1;5614/chr4:1602:chr4:37245765-37245639:2;5615/chr4:1602:chr4:37245765-37245639:1;5616/chr7:
1084:chr7:4922855-4922683:2;5617/chr7:1084:chr7:4922855-4922683:1;5618/chr16:3098:chr16:73100670-731
00502:2;5619/chr16:3098:chr16:73100670-73100502:1;5620/chr20:946:chr20:32857163-32856988:2;5621/chr2
0:946:chr20:32857163-32856988:1;5622/cg12584684:chr4:96471254-96471102:1;5623/chr20:924:chr20:32254
695-32254524:2;5624/chr20:924:chr20:32254695-32254524:1;5625/chr6:2544:chr6:137244943-137244813:2;5
626/chr6:2544:chr6:137244943-137244813:1;5627/chrX:132:chrX:933906-933732:2;5628/chrX:132:chrX:93390
6-933732:1;5629/chr19:3094:chr19:36246781-36246606:2;5630/chr19:3094:chr19:36246781-36246606:1;5631/
chr22:1894:chr22:46659169-46659009:2;5632/chr22:1894:chr22:46659169-46659009:1;5633/chr2:1902:chr2:6
3275075-63274907:2;5634/chr2:1902:chr2:63275075-63274907:1;5635/chr22:1790:chr22:46263325-46263195:
2;5636/chr22:1790:chr22:46263325-46263195:1;5637/chr6:21:chr6:392249-392123:2;5638/chr6:21:chr6:39224
9-392123:1;5639/chr16:375:chr16:1203102-1202962:2;5640/chr16:375:chr16:1203102-1202962:1;5641/chr19:2
032:chr19:17439716-17439561:2;5642/chr19:2032:chr19:17439716-17439561:1;5643/chr16:4109:chr16:88497
263-88497133:2;5644/chr16:4109:chr16:88497263-88497133:1;5645/chr4:56:chr4:675886-675711:2;5646/chr2:
4739:chr2:219866463-219866334:2;5647/chr22:14:chr22:17082729-17082562:2;5648/chr22:14:chr22:1708272
9-17082562:1;5649/chr16:1606:chr16:23847846-23847674:2;5650/chr16:1606:chr16:23847846-23847674:1;56
51/chr18:1613:chr18:76741126-76740961:2;5652/chr18:1613:chr18:76741126-76740961:1;5653/chr8:2113:chr
8:91803804-91803648:2;5654/chr8:2113:chr8:91803804-91803648:1;5655/chr9:376:chr9:35675734-35675563:
2;5656/chr9:376:chr9:35675734-35675563:1;5657/chr22:2727:chr22:50737950-50737780:2;5658/chr22:2727:c
hr22:50737950-50737780:1;5659/chr16:4191:chr16:88701522-88701378:2;5660/chr16:4191:chr16:88701522-8
8701378:1;5661/chr5:2254:chr5:132161908-132161783:2;5662/chr5:3395:chr5:176024006-176023831:2;5663/
chr5:3395:chr5:176024006-176023831:1;5664/chr18:487:chr18:22929814-22929644:2;5665/chr18:487:chr18:2
2929814-22929644:1;5666/chr10:2698:chr10:102587158-102586988:1;5667/chr12:1171:chr12:52652665-5265
2534:2;5668/chr12:1171:chr12:52652665-52652534:1;5669/chr5:2559:chr5:140871691-140871518:2;5670/chr5:
2559:chr5:140871691-140871518:1;5671/chr15:1198:chr15:68119606-68119446:2;5672/chr15:1198:chr15:681
19606-68119446:1;5673/chr22:161:chr22:19711058-19710889:2;5674/chr22:161:chr22:19711058-19710889:1;
5675/cg04992638:chr17:43339363-43339193:2;5676/cg04992638:chr17:43339363-43339193:1;5677/chr4:241:
chr4:1537998-1537849:1;5678/chr1:7360:chr1:246952511-246952336:2;5679/chr1:7360:chr1:246952511-2469
52336:1;5680/chr2:1990:chr2:66672616-66672448:2;5681/chr2:1990:chr2:66672616-66672448:1;5682/chr18:1
046:chr18:56941474-56941302:2;5683/chr18:1046:chr18:56941474-56941302:1;5684/chr18:994:chr18:550950
00-55094875:2;5685/chr18:994:chr18:55095000-55094875:1;5686/chr14:411:chr14:38724586-38724453:2;568
7/chr14:411:chr14:38724586-38724453:1;5688/chr21:59:chr21:19617260-19617093:2;5689/chr21:59:chr21:196
17260-19617093:1;5690/chr2:5240:chr2:237078678-237078505:2;5691/chr2:5240:chr2:237078678-237078505:
1;5692/chr12:3051:chr12:130388125-130387982:2;5693/chr12:3051:chr12:130388125-130387982:1;5694/chr9:
1343:chr9:110250320-110250162:2;5695/chr9:1343:chr9:110250320-110250162:1;5696/chr5:3993:chr5:18048
6505-180486361:2;5697/chr5:3993:chr5:180486505-180486361:1;5698/chr5:2254:chr5:132161908-132161783:
1;5699/chr7:4153:chr7:150812462-150812321:2;5700/chr7:4153:chr7:150812462-150812321:1;5701/chr4:1685:
chr4:41869429-41869262:2;5702/chr4:1685:chr4:41869429-41869262:1;5703/chr13:1468:chr13:112727628-11
2727494:2;5704/chr13:1468:chr13:112727628-112727494:1;5705/chr10:801:chr10:17496568-17496394:2;5706/
chr10:801:chr10:17496568-17496394:1;5707/chr11:141:chr11:849848-849719:2;5708/chr11:141:chr11:849848-
849719:1;5709/chr12:1313:chr12:54423627-54423453:2;5710/chr12:1313:chr12:54423627-54423453:1;5711/c
hr22:1367:chr22:42679541-42679383:2;5712/chr22:1367:chr22:42679541-42679383:1;5713/chr6:890:chr6:295
21475-29521327:2;5714/chr6:890:chr6:29521475-29521327:1;5715/chr2:1220:chr2:25439236-25439089:2;571
6/chr2:1220:chr2:25439236-25439089:1;5717/chr20:2210:chr20:59827942-59827802:2;5718/chr20:2210:chr20:
59827942-59827802:1;5719/chr3:20:chr3:2140692-2140567:2;5720/chr3:20:chr3:2140692-2140567:1;5721/chr
17:4566:chr17:79919939-79919807:2;5722/chr17:4566:chr17:79919939-79919807:1;5723/chr7:3763:chr7:1391
68029-139167878:2;5724/chr7:3763:chr7:139168029-139167878:1;5725/chr3:2394:chr3:128274309-12827414
9:2;5726/chr3:2394:chr3:128274309-128274149:1;5727/chr11:4527:chr11:126286718-126286556:2;5728/chr11:
4527:chr11:126286718-126286556:1;5729/chr2:4224:chr2:176957722-176957553:2;5730/chr2:4224:chr2:1769
57722-176957553:1;5731/chr1:7209:chr1:237205651-237205479:2;5732/chr1:7209:chr1:237205651-23720547
9:1;5733/chr13:874:chr13:79177711-79177558:2;5734/chr13:874:chr13:79177711-79177558:1;5735/chr5:3113:
chr5:170289726-170289592:2;5736/chr5:3113:chr5:170289726-170289592:1;5737/chr14:1682:chr14:97499691-
97499557:2;5738/chr14:1682:chr14:97499691-97499557:1;5739/chr5:2254:chr5:132161839-132161673:1;574
0/chr20:2210:chr20:59827590-59827450:2;5741/chr20:2210:chr20:59827590-59827450:1;5742/chr10:4059:chr
10:131763512-131763357:2;5743/chr10:4059:chr10:131763512-131763357:1;5744/chr10:861:chr10:22542665-
22542525:2;5745/chr10:861:chr10:22542665-22542525:1;5746/chr16:726:chr16:2835707-2835557:2;5747/chr1
6:726:chr16:2835707-2835557:1;5748/chr15:753:chr15:4547971745479584:2;5749/chr15:753:chr15:45479717-
45479584:1;5750/chr7:735:chr7:2558495-2558331:2;5751/chr7:735:chr7:2558495-2558331:1;5752/chr4:56:chr
4:675886-675711:1;5753/chr2:4739:chr2:219866463-219866334:1;5754/chr4:391:chr4:2042346-2042172:2;575
5/chr14:931:chr14:72399453-72399302:2;5756/chr14:931:chr14:72399453-72399302:1;5757/chr5:2325:chr5:13
4364785-134364610:2;5758/chr5:2325:chr5:134364785-134364610:1;5759/chr4:391:chr4:2042346-2042172:1;
5760/chr14:2078:chr14:102027529-102027357:2;5761/chr14:2078:chr14:102027529-102027357:1;5762/chr1:3
004:chr1:25257252-25257112:2;5763/chr1:3004:chr1:25257252-25257112:1;5764/chr5:3113:chr5:170289076-1
70288926:2;5765/chr5:3113:chr5:170289076-170288926:1;5766/chr2:1992:chr2:66673340-66673170:2;5767/c
hr2:1992:chr2:66673340-66673170:1;5768/chr15:1842:chr15:84322769-84322594:2;5769/chr15:1842:chr15:84
322769-84322594:1;5770/chr10:583:chr10:11059779-11059606:2;5771/chr10:583:chr10:11059779-11059606:1;
5772/chr18:637:chr18:35065518-35065382:2;5773/chr18:637:chr18:35065518-35065382:1;5774/chr11:69:chr1
1:504566-504396:2;5775/chr11:69:chr11:504566-504396:1;5776/chr15:628:chr15:41787984-41787836:2;5777/
chr15:628:chr15:41787984-41787836:1;5778/chr11:141:chr11:850072-849924:2;5779/chr11:141:chr11:850072-
849924:1;5780/chr15:207:chr15:27112810-27112675:2;5781/chr15:207:chr15:27112810-27112675:1;5782/chr7:
3616:chr7:130418851-130418709:2;5783/chr7:3616:chr7:130418851-130418709:1;5784/chr18:768:chr18:4452
7124-44526983:2;5785/chr18:768:chr18:44527124-44526983:1;5786/chr7:3489:chr7:126988181-126988007:2;
5787/chr7:3489:chr7:126988181-126988007:1;5788/chr10:3445:chr10:124896628-124896472:2;5789/chr13:14
67:chr13:112727318-112727168:2;5790/chr13:1467:chr13:112727318-112727168:1;5791/chr18:1835:chr18:77
548155-77548011:2;5792/chr18:1835:chr18:77548155-77548011:1;5793/chr20:2212:chr20:59829028-5982885
4:2;5794/chr20:2212:chr20:59829028-59828854:1;5795/chr10:3445:chr10:124896628-124896472:1;5796/chr7:
2148:chr7:49815639-49815507:2;5797/chr7:2148:chr7:49815639-49815507:1;5798/chr2:4772:chr2:220313181-
220313025:2;5799/chr2:4772:chr2:220313181-220313025:1;5800/chr8:1695:chr8:53852326-53852151:2;5801/
chr8:1695:chr8:53852326-53852151:1;5802/cg00817367:chr12:52401280-52401118:1;5803/chr4:202:chr4:139
9087-1398919:2;5804/chr4:202:chr4:1399087-1398919:1;5805/chr20:2928:chr20:62119708-62119535:2;5806/c
hr20:2928:chr20:62119708-62119535:1;5807/chr17:3502:chr17:73749971-73749845:2;5808/chr17:3502:chr17:
73749971-73749845:1;5809/chr1:4054:chr1:50888835-50888704:2;5810/chr1:4054:chr1:50888835-50888704:1;
5811/chr3:2434:chr3:128764700-128764537:2;5812/chr3:2434:chr3:128764700-128764537:1;5813/chr19:56:c
hr19:519287-519126:2;5814/chr19:56:chr19:519287-519126:1;5815/chr19:1577:chr19:11689915-11689741:2;5
816/chr19:1577:chr19:11689915-11689741:1;5817/cg22538054:chr12:95942041-95941906:2;5818/cg2253805
4:chr12:95942041-95941906:1;5819/chr17:4420:chr17:79315133-79314962:2;5820/chr17:4420:chr17:7931513
3-79314962:1;5821/chr7:3500:chr7:127671286-127671159:2;5822/chr7:3500:chr7:127671286-127671159:1;58
23/chr20:55:chr20:826016-825843:2;5824/chr20:55:chr20:826016-825843:1;5825/chr3:1158:chr3:48699245-48
699071:2;5826/chr3:1158:chr3:48699245-48699071:1;5827/chr9:1070:chr9:96714495-96714322:2;5828/chr9:1
070:chr9:96714495-96714322:1;5829/chr15:1200:chr15:68120586-68120418:2;5830/chr16:2511:chr16:553585
67-55358398:2;5831/chr16:2511:chr16:55358567-55358398:1;5832/chr19:267:chr19:1169158-1169009:2;5833/
chr19:267:chr19:1169158-1169009:1;5834/chr15:1200:chr15:68120586-68120418:1;5835/chr17:2307:chr17:45
786578-45786437:2;5836/chr17:2307:chr17:45786578-45786437:1;5837/chr1:5084:chr1:145562958-14556278
6:2;5838/chr1:5084:chr1:145562958-145562786:1;5839/cg21938148:chr13:110959065-110958892:1;5840/chr1:
5027:chr1:119533005-119532832:2;5841/chr1:5027:chr1:119533005-119532832:1;5842/cg05238517:chr11:10
4034369-104034195:1;5843/chr1:6195:chr1:203045304-203045137:2;5844/chr1:6195:chr1:203045304-203045
137:1;5845/chr16:1850:chr16:29888266-29888127:2;5846/chr16:1850:chr16:29888266-29888127:1;5847/chr1:
4908:chr1:113052004-113051829:1;5848/chr2:4772:chr2:220313324-220313176:2;5849/chr2:4772:chr2:22031
3324-220313176:1;5850/chr13:1782:chr13:114524069-114523894:2;5851/chr13:1782:chr13:114524069-11452
3894:1;5852/chr12:1171:chr12:52652387-52652216:2;5853/chr12:1171:chr12:52652387-52652216:1;5854/chr1:
3659:chr1:39957476-39957306:2;5855/chr1:3659:chr1:39957476-39957306:1;5856/chr15:2253:chr15:9538858
8-95388417:2;5857/chr15:2253:chr15:95388588-95388417:1;5858/chr7:1533:chr7:27205311-27205186:2;5859/
chr7:1533:chr7:27205311-27205186:1;5860/chr18:1140:chr18:67068679-67068508:2;5861/chr18:1140:chr18:6
7068679-67068508:1;5862/chr4:2981:chr4:189203881-189203706:2;5863/chr4:2981:chr4:189203881-1892037
06:1;5864/chr20:144:chr20:2732755-2732582:2;5865/chr20:144:chr20:2732755-2732582:1;5866/chr5:1826:chr
5:77806081-77805956:2;5867/chr5:1826:chr5:77806081-77805956:1;5868/cg06995920:chr12:64062619-64062
459:2;5869/cg04455164:chr12:64062619-64062459:2;5870/cg06995920:chr12:64062619-64062459:1;5871/cg
04455164:chr12:64062619-64062459:1;5872/chr17:1113:chr17:14212620-14212467:2;5873/chr17:1113:chr17:
14212620-14212467:1;5874/chr18:577:chr18:32073936-32073761:2;5875/chr18:577:chr18:32073936-3207376
1:1;5876/cg02526522:chr11:128563749-128563576:1;5877/chr18:723:chr18:43914226-43914053:2;5878/chr18:
723:chr18:43914226-43914053:1;5879/chr22:141:chr22:19512332-19512165:2;5880/chr22:141:chr22:1951233
2-19512165:1;5881/chr6:1002:chr6:31466008-31465838:2;5882/chr6:1002:chr6:31466008-31465838:1;5883/ch
rX:810:chrX:48685208-48685047:2;5884/chrX:810:chrX:48685208-48685047:1;5885/chr18:77:chr18:4455361-4
455197:2;5886/chr18:77:chr18:4455361-4455197:1;5887/chr15:1417:chr15:74426087-74425915:2;5888/chr15:
1417:chr15:74426087-74425915:1;5889/chr19:3621:chr19:42704048-42703889:2;5890/chr19:3621:chr19:4270
4048-42703889:1;5891/chr18:1044:chr18:56940665-56940493:2;5892/chr18:1044:chr18:56940665-56940493:1;
5893/chr6:95:chr6:1378815-1378642:2;5894/chr6:95:chr6:1378815-1378642:1;5895/chr10:629:chr10:1178466
1-11784500:2;5896/chr10:629:chr10:11784661-11784500:1;5897/chr18:1360:chr18:74962761-74962636:2;589
8/chr18:1360:chr18:74962761-74962636:1;5899/chr3:2978:chr3:170137642-170137498:2;5900/chr3:2978:chr3:
170137642-170137498:1;5901/chr7:4691:chr7:156796899-156796731:2;5902/chr7:4691:chr7:156796899-1567
96731:1;5903/chr14:578:chr14:57264923-57264748:2;5904/chr14:578:chr14:57264923-57264748:1;5905/chr19:
3999:chr19:48947166-48947021:2;5906/chr19:3999:chr19:48947166-48947021:1;5907/chr14:626:chr14:59931
541-59931381:2;5908/chr14:626:chr14:59931541-59931381:1;5909/chr4:15:chr4:330723-330592:2;5910/chr4:1
5:chr4:330723-330592:1;5911/chr17:4140:chr17:77789621-77789455:2;5912/chr17:4140:chr17:77789621-7778
9455:1;5913/chr19:2639:chr19:30866152-30865978:2;5914/chr19:2639:chr19:30866152-30865978:1;5915/cg0
1163842:chr14:95235193-95235024:2:5916/cg01163842:chr14:95235193-95235024:1;5917/chr1:4827:chr1:11
0613551-110613426:1;5918/chr17:3065:chr17:70112144-70111978:2;5919/chr17:3065:chr17:70112144-70111
978:1;5920/chr2:1230:chr2:25500053-25499880:2;5921/chr2:1230:chr2:25500053-25499880:1;5922/chr5:1861:
chr5:79866002-79865832:2;5923/chr6:1861:chr5:79866002-79865832:1;5924/cg04261408:chr8:97506712-975
06541:1;5925/chr21:324:chr21:38076912-38076760:2;5926/chr21:324:chr21:38076912-38076760:1;5927/chr8:
1962:chr8:70982068-70981941:2;5928/chr8:1962:chr8:70982068-70981941:1;5929/chr15:1205:chr15:6812242
9-68122260:2;5930/chr15:1205:chr15:68122429-68122260:1;5931/chr3:3248:chr3:186490814-186490642:2;59
32/chr3:3248:chr3:186490814-186490642:1;5933/cg24446548:chr7:19157307-19157173:2;5934/cg24446548:c
hr7:19157307-19157173:1;5935/chr15:2554:chr15:102029932-102029775:2;5936/chr15:2554:chr15:102029932-
102029775:1;5937/chr22:14:chr22:17082836-17082687:2;5938/chr22:14:chr22:17082836-17082687:1;5939/ch
r5:2729:chr5:149546693-149546549:2;5940/chr5:2729:chr5:149546693-149546549:1;5941/chr11:2620:chr11:6
6885832-66885684:2;5942/chr11:2620:chr11:66885832-66885684:1;5943/chr19:2895:chr19:34112897-341127
45:2;5944/chr19:2895:chr19:34112897-34112745:1;5945/chr5:2450:chr5:138730244-138730099:2;5946/chr19:
2031:chr19:17439281-17439106:2;5947/chr19:2031:chr19:17439281-17439106:1;5948/chr19:367:chr19:14680
98-1467932:2;5949/chr19:367:chr19:1468098-1467932:1;5950/chr5:2450:chr5:138730244-138730099:1;5951/c
hr22:2205:chr22:48971511-48971359:2;5952/chr22:2205:chr22:48971511-48971359:1;5953/chr15:428:chr15:3
1776109-31775934:2;5954/chr15:428:chr15:31776109-31775934:1;5955/chr18:989:chr18:55019875-55019712:
1;5956/chr4:207:chr4:1400597-1400431:2;5957/chr4:207:chr4:1400597-1400431:1;5958/chr8:2113:chr8:91803
995-91803870:2;5959/chr8:2113:chr8:91803995-91803870:1;5960/chr15:2003:chr15:89922598-89922472:2;59
61/chr2:4079:chr2:171570360-171570195:2;5962/chr2:4079:chr2:171570360-171570195:1;5963/chr8:2284:chr
8:102506246-102506076:2;5964/chr8:2284:chr8:102506246-102506076:1;5965/chr1:2566:chr1:18434439-1843
4311:2;5966/chr1:2566:chr1:18434439-18434311:1;5967/chr19:392:chr19:1524388-1524256:2;5968/chr19:392:
chr19:1524388-1524256:1;5969/chr2:5231:chr2:237072463-237072312:2;5970/chr2:5231:chr2:237072463-237
072312:1;5971/chr18:1125:chr18:63418321-63418149:2;5972/chr18:1125:chr18:63418321-63418149:1;5973/c
hr15:2003:chr15:89922598-89922472:1;5974/chr1:6544:chr1:214153411-214153267:2;5975/chr1:6544:chr1:21
4153411-214153267:1;5976/chr10:784:chr10:16562384-16562252:2;5977/chr10:784:chr10:16562384-1656225
2:1;5978/chr17:176:chr17:1174133-1173958:2;5979/chr17:176:chr17:1174133-1173958:1;5980/chr18:1140:chr
18:67068305-67068162:2;5981/chr18:1140:chr18:67068305-67068162:1;5982/chr19:3278:chr19:38886596-388
86453:2;5983/chr19:3278:chr19:38886596-38886453:1;5984/chr22:2146:chr22:48885541-48885378:2;5985/chr
22:2146:chr22:48885541-48885378:1;5986/chr10:2350:chr10:88728396-88728260:2;5987/chr2:5862:chr2:2424
98651-242498479:2;5988/chr2:5862:chr2:242498651-242498479:1;5989/chr6:138:chr6:1615177-1615052:2;59
90/chr6:138:chr6:1615177-1615052:1;5991/chr12:3095:chr12:130647507-130647367:2;5992/chr12:3095:chr12:
130647507-130647367:1;5993/chr14:627:chr14:59931992-59931831:2;5994/chr14:627:chr14:59931992-59931
831:1;5995/chr2:5862:chr2:242498721-242498552:2;5996/chr2:5862:chr2:242498721-242498552:1;5997/chr8:
1921:chr8:67873665-67873500:2;5998/chr8:1921:chr8:67873665-67873500:1;5999/chr10:2350:chr10:8872839
6-88728260:1;6000/chr7:3616:chr7:130419074-130418920:1;6001/chr5:514:chr5:1887499-1887339:2;6002/chr
5:514:chr5:1887499-1887339:1;6003/chr5:3347:chr5:175224103-175223936:2;6004/chr5:3347:chr5:175224103-
175223936:1;6005/chr4:15:chr4:330537-330407:2;6006/chr4:15:chr4:330537-330407:1;6007/chr10:2401:chr10:
94449835-94449662:2;6008/chr10:2401:chr10:94449835-94449662:1;6009/chr20:764:chr20:26189186-261890
11:2;6010/chr20:764:chr20:26189186-26189011:1;6011/chr19:3890:chr19:47153247-47153075:2;6012/chr19:3
890:chr19:47153247-47153075:1;6013/chr1:5286:chr1:154475470-154475330:2;6014/chr1:5286:chr1:1544754
70-154475330:1;6015/chr20:765:chr20:26189874-26189717:2;6016/chr20:765:chr20:26189874-26189717:1;60
17/chr19:1577:chr19:11689972-11689797:1;6018/chr2:3108:chr2:115919832-115919657:2;6019/chr2:3108:chr
2:115919832-115919657:1;6020/chr17:2060:chr17:40822267-40822117:2;6021/chr17:2060:chr17:40822267-40
822117:1;6022/chr13:877:chr13:79183841-79183703:2;6023/chr13:877:chr13:79183841-79183703:1;6024/chr9:
2117:chr9:132382632-132382477:2;6025/chr9:2117:chr9:132382632-132382477:1;6026/chr10:2358:chr10:903
43204-90343030:2;6027/chr10:2358:chr10:90343204-90343030:1;6028/chr7:3501:chr7:127671862-127671704:
2;6029/chr7:3501:chr7:127671862-127671704:1;6030/chr12:428:chr12:6665108-6664937:1;6031/chr9:60:chr9:
1051814-1051639:2;6032/chr9:60:chr9:1051814-1051639:1;6033/chr1:6194:chr1:203044899-203044759:2;603
4/chr1:6194:chr1:203044899-203044759:1;6035/chr2:1560:chr2:42720506-42720356:2;6036/chr2:1560:chr2:42
720506-42720356:1;6037/chr19:2895:chr19:34113030-34112858:2;6038/chr19:2895:chr19:34113030-3411285
8:1;6039/chr14:586:chr14:57276035-57275860:2;6040/chr14:586:chr14:57276035-57275860:1;6041/chr6:21:ch
r6:392409-392234:2;6042/chr6:21:chr6:392409-392234:1;6043/chr4:2032:chr4:81124206-81124049:2;6044/chr
4:2032:chr4:81124206-81124049:1;6045/chr5:3113:chr5:170289370-170289203:1;6046/chr8:354:chr8:1950507-
1950350:2;6047/chr8:354:chr8:1950507-1950350:1;6048/chr3:2636:chr3:138664580-138664436:2;6049/chr3:2
636:chr3:138664580-138664436:1;6050/chr10:861:chr10:22542355-22542187:2;6051/chr10:861:chr10:225423
55-22542187:1;6052/chr7:2589:chr7:70596977-70596816:2;6053/chr7:2589:chr7:70596977-70596816:1;6054/c
hr4:1602:chr4:37245890-37245755:2;6055/chr4:1602:chr4:37245890-37245755:1;6056/chr11:104:chr11:63968
7-639520:2;6057/chr2:4186:chr2:175201381-175201219:2;6058/chr2:4186:chr2:175201381-175201219:1;6059/
chr11:104:chr11:639687-639520:1;6060/chr7:3975:chr7:149119747-149119596:2;6061/chr7:3975:chr7:149119
747-149119596:1;6062/chr20:1816:chr20:55206283-55206143:2;6063/chr20:1816:chr20:55206283-55206143:1;
6064/chr10:2403:chr10:94450443-94450308:2;6065/chr10:2403:chr10:94450443-94450308:1;6066/chr8:1788:
chr8:57358471-57358339:2;6067/chr8:1788:chr8:57358471-57358339:1;6068/chr6:2396:chr6:117869225-1178
69068:2;6069/chr6:2396:chr6:117869225-117869068:1;6070/chr7:1519:chr7:27195776-27195601:2;6071/chr7:
1519:chr7:27195776-27195601:1;6072/chr19:322:chr19:1295724-1295549:2;6073/chr19:322:chr19:1295724-12
95549:1;6074/chr1:1852:chr1:8277718-8277568:2;6075/chr1:1852:chr1:8277718-8277568:1;6076/chr19:553:ch
r19:2252101-2251946:2;6077/chr19:553:chr19:2252101-2251946:1;6078/chr2:3074:chr2:114035004-11403484
3:2;6079/chr4:2973:chr4:188916952-188916798:2;6080/chr18:723:chr18:43913923-43913761:2;6081/chr18:72
3:chr18:43913923-43913761:1;6082/chr2:3074:chr2:114035004-114034843:1;6083/chr4:2973:chr4:188916952-
188916798:1;6084/chr2:2631:chr2:99439114-99438962:2;6085/chr2:2631:chr2:99439114-99438962:1;6086/chr
17:1867:chr17:36718302-36718143:2;6087/chr17:1867:chr17:36718302-36718143:1;6088/chr11:461:chr11:186
3973-1863822:2;6089/chr11:461:chr11:1863973-1863822:1;6090/chr1:5137:chr1:150522174-150522001:2;609
1/chr1:5137:chr1:150522174-150522001:1;6092/chr12:3052:chr12:130388764-130388596:2;6093/chr12:3052:c
hr12:130388764-130388596:1;6094/cg10512745:chr1:50884503-50884345:2;6095/cg10512745:chr1:50884503-
50884345:1;6096/chr1:1360:chr1:4221643-4221477:2;6097/chr1:1360:chr1:4221643-4221477:1;6098/chr19:49
04:chr19:58570654-58570520:2;6099/chr19:4904:chr19:58570654-58570520:1;6100/chr22:369:chr22:2286291
6-22862766:2;6101/chr22:369:chr22:22862916-22862766:1;6102/chr18:637:chr18:35065417-35065275:2;6103/
chr18:637:chr18:35065417-35065275:1;6104/chr6:380:chr6:10382369-10382195:2;6105/chr4:1265:chr4:88603
99-8860227:2:6106/chr1:255:chr1:1567521-1567349:2;6107/chr1:255:chr1:1567521-1567349:1;6108/chr5:1172:
chr5:15500589-15500424:2;6109/chr1:3539:chr1:37499966-37499814:2;6110/chr1:3539:chr1:37499966-37499
814:1;6111/chr2:4945:chr2:231693374-231693217:2;6112/chr2:4945:chr2:231693374-231693217:1;6113/chr5:
1172:chr5:15500589-15500424:1;6114/chr14:578:chr14:57265238-57265091:2;6115/chr14:578:chr14:5726523
8-57265091:1;6116/chr19:3157:chr19:37096331-37096197:1;6117/chr5:1726:chr5:72733070-72732898:2;6118/
chr5:1726:chr5:72733070-72732898:1;6119/chr1:1408:chr1:4715443-4715288:2;6120/chr1:1408:chr1:4715443-
4715288:1;6121/chr7:2162:chr7:50344065-50343906:2;6122/chr7:2162:chr7:50344065-50343906:1;6123/chr6:
380:chr6:10382369-10382195:1;6124/chr4:1265:chr4:8860399-8860227:1;6125/chr16:2882:chr16:67428310-67
428160:2;6126/chr16:2882:chr16:67428310-67428160:1;6127/chr19:4944:chr19:58907970-58907799:2;6128/c
hr19:4944:chr19:58907970-58907799:1;6129/chr8:2786:chr8:140716132-140715978:2;6130/chr8:2786:chr8:14
0716132-140715978:1;6131/chr16:2379:chr16:51168402-51168277:2;6132/chr16:2379:chr16:51168402-51168
277:1;6133/chr1:645:chr1:2706435-2706275:2;6134/chr1:645:chr1:2706435-2706275:1;6135/chr4:2081:chr4:85
414500-85414335:2;6136/chr4:2081:chr4:85414500-85414335:1;6137/chr8:2241:chr8:99960687-99960533:2;6
138/chr12:2900:chr12:127630608-127630479:2;6139/chr12:2900:chr12:127630608-127630479:1;6140/chr8:22
41:chr8:99960687-99960533:1;6141/chr8:2717:chr8:139509484-139509342:2;6142/chr8:2717:chr8:139509484-
139509342:1;6143/chr20:1322:chr20:43727417-43727246:2;6144/chr20:1322:chr20:43727417-43727246:1;614
5/chr20:620:chr20:23029334-23029165:2;6146/chr20:620:chr20:23029334-23029165:1;6147/chr6:852:chr6:289
45313-28945142:2;6148/chr6:852:chr6:28945313-28945142:1;6149/chr5:2522:chr5:140306339-140306167:2;6
150/chr5:2522:chr5:140306339-140306167:1;6151/chr2:4287:chr2:177043089-177042954:2;6152/chr2:4287:ch
r2:177043089-177042954:1;6153/chr20:555:chr20:21503486-21503361:2;6154/chr20:555:chr20:21503486-215
03361:1;6155/chr17:2653:chr17:54756036-54755893:2;6156/chr17:2653:chr17:54756036-54755893:1;6157/chr
6:138:chr6:1614662-1614512:2;6158/chr6:138:chr6:1614662-1614512:1;6159/chrX:693:chrX:40005438-400052
93:2;6160/chr15:2011:chr15:89950925-89950795:2;6161/chr15:2011:chr15:89950925-89950795:1;6162/chr6:1
985:chr6:85484265-85484099:2;6163/chr6:1985:chr6:85484265-85484099:1;6164/chr5:3916:chr5:180018487-1
80018326:2;6165/chr5:3916:chr5:180018487-180018326:1;6166/chr1:3805:chr1:44031780-44031655:2;6167/c
hr1:3805:chr1:44031780-44031655:1;6168/chrX:693:chrX:40005438-40005293:1;6169/chr10:2024:chr10:77156
888-77156723:2;6170/chr10:2024:chr10:77156888-77156723:1;6171/chr17:2653:chr17:54756160-54755985:2;
6172/chr17:2653:chr17:54756160-54755985:1;6173/chr8:42:chr8:689358-689185:1;6174/chr14:212:chr14:2706
7365-27067213:2;6175/chr21:948:chr21:45875566-45875420:2;6176/chr21:948:chr21:45875566-45875420:1;6
177/chr14:212:chr14:27067365-27067213:1;6178/chr6:2544:chr6:137244816-137244641:2;6179/chr6:2544:chr
6:137244816-137244641:1;6180/chr6:2392:chr5:135266425-135266290:2;6181/chr5:2392:chr5:135266425-135
266290:1;6182/chr7:4146:chr7:150778929-150778781:1;6183/chr10:1587:chr10:52178191-52178042:2;6184/c
hr10:1587:chr10:52178191-52178042:1;6185/chr16:726:chr16:2835652-2835510:2;6186/chr16:726:chr16:2835
652-2835510:1;6187/chr11:2620:chr11:66885299-66885163:2;6188/chr11:2620:chr11:66885299-66885163:1;6
189/chr12:3619:chr12:133484966-133484792:2;6190/chr6:245:chr6:4776211-4776040:2;6191/chr6:245:chr6:47
76211-4776040:1;6192/chr10:905:chr10:23480998-23480833:2;6193/chr10:905:chr10:23480998-23480833:1;6
194/chr8:37:chr8:687143-686981:2;6195/chr8:37:chr8:687143-686981:1;6196/chr20:1878:chr20:55965213-559
65073:2;6197/chr20:1878:chr20:55965213-55965073:1;6198/chr5:91:chr5:528981-528856:2;6199/chr5:91:chr5:
528981-528856:1;6200/chr9:1427:chr9:116225797-116225647:2;6201/chr9:1427:chr9:116225797-116225647:1;
6202/chr14:1633:chr14:96343500-96343352:2;6203/chr14:1633:chr14:96343500-96343352:1;6204/chr2:605:c
hr2:5837435-5837276:2;6205/chr2:605:chr2:5837435-5837276:1;6206/chr9:1388:chr9:113341965-113341810:
1;6207/chr2:4215:chr2:176945388-176945213:2;6208/chr2:4215:chr2:176945388-176945213:1;6209/chr17:277
8:chr17:58227558-58227398:2;6210/chr17:2778:chr17:58227558-58227398:1;6211/chr12:3619:chr12:1334849
66-133484792:1;6212/chr18:765:chr18:44338048-44337892:2;6213/chr18:765:chr18:44338048-44337892:1;62
14/chr1:3805:chr1:44031658-44031483:2;6215/chr1:3805:chr1:44031658-44031483:1;6216/chr14:92:chr14:238
35017-23834845:2;6217/chr14:92:chr14:23835017-23834845:1;6218/chr1:1254:chr1:3567506-3567358:2;6219/
chr1:1254:chr1:3567506-3567358:1;6220/chr7:4724:chr7:157072394-157072245:2;6221/chr7:4724:chr7:15707
2394-157072245:1;6222/chr7:1307:chr7:19156872-19156722:2;6223/chr7:1307:chr7:19156872-19156722:1;62
24/cg25023275:chr18:35146520-35146345:1;6225/chr1:1594:chr1:6126565-6126409:2;6226/chr1:1594:chr1:61
26565-6126409:1;6227/chr16:3098:chr16:73100355-73100229:2;6228/chr16:3098:chr16:73100355-73100229:1;
6229/chr2:4263:chr2:176995352-176995189:2;6230/chr2:4263:chr2:176995352-176995189:1;6231/chr20:2966:
chr20:62273016-62272890:2;6232/chr20:2966:chr20:62273016-62272890:1;6233/chr6:789:chr6:27725448-277
25301:1;6234/chr2:4131:chr2:172965313-172965138:2;6235/chr2:4131:chr2:172965313-172965138:1;6236/chr
13:236:chr13:25320484-25320348:2;6237/chr14:2086:chr14:102057233-102057077:2;6238/chr14:2086:chr14:1
02057233-102057077:1;6239/chr1:3709:chr1:41327944-41327808:2;6240/chr1:3709:chr1:41327944-41327808:
1;6241/chr13:236:chr13:25320484-25320348:1;6242/chr22:1094:chr22:38478958-38478822:2;6243/chr22:1094:
chr22:38478958-38478822:1;6244/chrX:666:chrX:39864599-39864460:2;6245/chrX:666:chrX:39864599-39864
460:1;6246/chr10:4054:chr10:131758148-131757973:2;6247/chr10:4054:chr10:131758148-131757973:1;6248/
cg25363607:chr7:90226416-90226241:1;6249/chr3:3168:chr3:184301860-184301697:2;6250/chr3:3168:chr3:1
84301860-184301697:1;6251/chr8:3703:chr8:145106620-145106487:2;6252/chr8:3703:chr8:145106620-14510
6487:1;6253/chr9:1770:chr9:127265784-127265626:2;6254/chr9:1770:chr9:127265784-127265626:1;6255/chr2:
4217:chr2:176947044-176946900:2;6256/chr2:4217:chr2:176947044-176946900:1;6257/chr1:3767:chr1:43250
967-43250816:2;6258/chr1:3767:chr1:43250967-43250816:1;6259/cg07961994:chr4:93227319-93227144:1;62
60/chr8:13:chr8:494735-494560:2;6261/chr8:13:chr8:494735-494560:1;6262/chr2:1181:chr2:24233315-242331
54:2;6263/chr2:1181:chr2:24233315-24233154:1;6264/chr6:1746:chr6:50818149-50817991:1;6265/chr13:1173:
chr13:109148200-109148038:2;6266/chr13:1173:chr13:109148200-109148038:1;6267/chr11:141:chr11:850248-
850090:2;6268/chr11:141:chr11:850248-850090:1;6269/chr22:1515:chr22:43807700-43807533:2;6270/chr22:1
515:chr22:43807700-43807533:1;6271/chr9:3255:chr9:139024751-139024593:2;6272/chr9:3255:chr9:1390247
51-139024593:1;6273/chr7:1491:chr7:27153337-27153175:2;6274/chr7:1491:chr7:27153337-27153175:1;6275/
chr8:1349:chr8:37555786-37555617:2;6276/chr8:1349:chr8:37555786-37555617:1;6277/chr18:280:chr18:1175
2227-11752099:2;6278/chr18:280:chr18:11752227-11752099:1;6279/chr1:224:chr1:1475854-1475725:2;6280/c
g16601494:chr1:1475854-1475712:2;6281/chr1:224:chr1:1475854-1475725:1;6282/cg16601494:chr1:1475854-
1475712:1;6283/chr6:920:chr6:30039569-30039402:2;6284/chr6:920:chr6:30039569-30039402:1;6285/chr11:3
716:chr11:101454247-101454084:2;6286/chr8:3776:chr8:145806421-145806253:2;6287/chr8:3776:chr8:14580
6421-145806253:1;6288/chr8:766:chr8:12809427-12809289:2;6289/chr8:766:chr8:12809427-12809289:1;6290/
chr7:3501:chr7:127672199-127672024:2;6291/chr7:3501:chr7:127672199-127672024:1;6292/chr17:1522:chr17:
27038993-27038820:2;6293/chr17:1522:chr17:27038993-27038820:1;6294/cg07195011:chr5:11904224-11904
058:2;6295/cg07195011:chr5:11904224-11904058:1;6296/chr10:3172:chr10:118894343-118894208:1;6297/chr
20:620:chr20:23029468-23029328:2;6298/chr20:620:chr20:23029468-23029328:1;6299/chr22:1248:chr22:4005
8031-40057893:2;6300/chr22:1248:chr22:40058031-40057893:1;6301/chr19:69:chr19:591781-591620:1;6302/c
hr9:1682:chr9:126136006-126135843:2;6303/chr9:1682:chr9:126136006-126135843:1;6304/chr11:1212:chr11:
13031153-13031007:2;6305/chr11:1212:chr11:13031153-13031007:1;6306/chr6:1872:chr6:72892478-7289230
7:2;6307/chr6:1872:chr6:72892478-72892307:1;6308/chr13:1461:chr13:112723166-112723012:2;6309/chr13:1
461:chr13:112723166-112723012:1;6310/chr5:2489:chr5:139228042-139227915:2;6311/chr5:2489:chr5:13922
8042-139227915:1;6312/chr1:4177:chr1:54203906-54203736:2;6313/chr1:4177:chr1:54203906-54203736:1;63
14/chr4:2250:chr4:111542182-111542007:2;6315/chr4:2250:chr4:111542182-111542007:1;6316/chr11:1511:ch
r11:31827174-31827003:2;6317/chr11:1511:chr11:31827174-31827003:1;6318/chr10:4868:chr10:135016088-1
35015916:2;6319/chr10:4868:chr10:135016088-135015916:1;6320/chr12:3095:chr12:130647641-130647492:2;
6321/chr12:3095:chr12:130647641-130647492:1;6322/chr8:3701:chr8:145104534-145104389:2;6323/chr1:225
7:chr1:13840011-13839848:2;6324/chr1:2257:chr1:13840011-13839848:1;6325/chr19:368:chr19:1469397-1469
235:2;6326/chr19:368:chr19:1469397-1469235:1;6327/chr8:3701:chr8:145104534-145104389:1;6328/chr1:59:c
hr1:969513-969349:2;6329/chr1:59:chr1:969513-969349:1;6330/chr15:1417:chr15:74425808-74425644:2;6331/
chr15:1417:chr15:74425808-74425644:1;6332/chr11:4765:chr11:131780758-131780627:2;6333/chr11:4765:ch
r11:131780758-131780627:1;6334/chr6:1322:chr6:35992510-35992365:2;6335/chr6:1322:chr6:35992510-3599
2365:1;6336/chr11:2279:chr11:63530421-63530247:2;6337/chr11:2279:chr11:63530421-63530247:1;6338/chr6:
2544:chr6:137245089-137244924:2;6339/chr6:2544:chr6:137245089-137244924:1;6340/chr15:2482:chr15:101
267698-101267531:1;6341/cg02650317:chr20:61809008-61808863:2;6342/cg02650317:chr20:61809008-6180
8863:1;6343/chr16:2476:chr16:54971316-54971144:1;6344/chr21:214:chr21:34442314-34442159:2;6345/chr21:
214:chr21:34442314-34442159:1;6346/chr1:7209:chr1:237205900-237205749:2;6347/chr1:7209:chr1:2372059
00-237205749:1;6348/chr11:3337:chr11:72295636-72295490:2;6349/chr11:3337:chr1172295636-72295490:1;
6350/chr19:2193:chr19:18771246-18771071:2;6351/chr19:2193:chr19:18771246-18771071:1;6352/chr11:105:c
hr11:640382-640240:2;6353/chr11:105:chr11:640382-640240:1;6354/chr2:3708:chr2:131721162-131721037:2;
6355/chr2:3708:chr2:131721162-131721037:1;6356/chr15:275:chr15:29131415-29131248:2;6357/chr15:275:ch
r15:29131415-29131248:1;6358/chr2:4217:chr2:176947194-176947029:2;6359/chr2:4217:chr2:176947194-176
947029:1;6360/chr11:3716:chr11:101454247-101454084:1;6361/chr8:1276:chr8:31498241-31498079:2;6362/c
hr8:1276:chr8:31498241-31498079:1;6363/chr20:946:chr20:32856904-32856747:2;6364/chr20:946:chr20:3285
6904-32856747:1;6365/chr4:1750:chr4:48492966-48492840:2;6366/chr4:1750:chr4:48492966-48492840:1;636
7/chr15:428:chr15:31776188-31776016:2;6368/chr15:428:chr15:31776188-31776016:1;6369/chr17:1867:chr17:
36718249-36718104:2;6370/chr17:1867:chr17:36718249-36718104:1;6371/chr1:1690:chr1:6507314-6507172:2;
6372/chr1:1690:chr1:6507314-6507172:1;6373/chr4:2602:chr4:155411794-155411651:2;6374/chr4:2602:chr4:
155411794-155411651:1;6375/chr5:1190:chr5:16180233-16180062:2;6376/chr5:1190:chr5:16180233-1618006
2:1;6377/chr19:2032:chr19:17439948-17439779:2;6378/chr19:2032:chr19:17439948-17439779:1;6379/chr18:9
89:chr18:55020141-55020003:2;6380/chr18:989:chr18:55020141-55020003:1;6381/chr7:2146:chr7:49815088-4
9814923:1;6382/chr8:1893:chr8:65493822-65493667:2;6383/chr8:1893:chr8:65493822-65493667:1;6384/chr5:
3695:chr5:178421602-178421458:2;6385/chr5:3695:chr5:178421602-178421458:1;6386/chr6:2396:chr6:11786
9279-117869107:2;6387/chr6:2396:chr6:117869279-117869107:1;6388/chr8:3309:chr8:143545608-143545438:
2;6389/chr8:3309:chr8:143545608-143545438:1;6390/chr16:1968:chr16:31489022-31488879:1;6391/chr10:345
7:chr10:124909688-124909513:2;6392/chr10:3457:chr10:124909688-124909513:1;6393/chr22:2759:chr22:509
82999-50982856:2;6394/chr22:2759:chr22:50982999-50982856:1;6395/chr7:3587:chr7:129423126-129422951:
2;6396/chr7:3587:chr7:129423126-129422951:1;6397/chr13:519:chr13:37006460-37006310:2;6398/chr13:519:
chr13:37006460-37006310:1;6399/chr1:5027:chr1:119532865-119532693:1;6400/chr13:1082:chr13:100649872-
100649730:2;6401/chr13:1082:chr13:100649872-100649730:1;6402/chr2:4182:chr2:175199605-175199460:2;
6403/chr2:4182:chr2:175199605-175199460:1;6404/chr3:3517:chr3:196255783-196255613:2;6405/chr3:3517:c
hr3:196255783-196255613:1;6406/chr2:4215:chr2:176945464-176945327:2;6407/chr2:4215:chr2:176945464-1
76945327:1;6408/chr2:1181:chr2:24233424-24233287:2;6409/chr2:1181:chr2:24233424-24233287:1;6410/chr1
0:4582:chr10:134598600-134598471:2;6411/chr10:4582:chr10:134598600-134598471:1;6412/chr11:2420:chr1
1:64428300-64428155:2;6413/chr11:2420:chr11:64428300-64428155:1;6414/chr10:3710:chr10:128077523-128
077394:2;6415/chr10:3710:chr10:128077523-128077394:1;6416/chr8:96:chr8:876946-876781:2;6417/chr8:96:c
hr8:876946-876781:1;6418/chr14:1433:chr14:93153600-93153457:1;6419/chr19:3765:chr19:45900194-459000
30:2;6420/chr19:3765:chr19:45900194-45900030:1;6421/chr19:392:chr19:1524468-1524303:2;6422/chr19:392:
chr19:1524468-1524303:1;6423/chr20:2023:chr20:57464386-57464221:2;6424/chr20:2023:chr20:57464386-57
464221:1;6425/chr10:2027:chr10:77159317-77159146:2;6426/chr10:2027:chr10:77159317-77159146:1;6427/c
hr11:98:chr11:626908-626783:2;6428/chr11:98:chr11:626908-626783:1;6429/chr19:551:chr19:2251616-22514
73:2;6430/chr19:551:chr19:2251616-2251473:1;6431/chr11:2774:chr11:68145477-68145328:1;6432/chr10:291
1:chr10:106401185-106401050:2;6433/chr10:2911:chr10:106401185-106401050:1;6434/chr15:634:chr15:4179
5212-41795045:2;6435/chr15:634:chr15:41795212-41795045:1;6436/chr20:3023:chr20:62463499-62463330:2;
6437/chr20:3023:chr20:62463499-62463330:1;6438/chr14:704:chr14:62217978-62217804:2;6439/chr18:768:ch
r18:44526913-44526738:2;6440/chr18:768:chr18:44526913-44526738:1;6441/chr7:2591:chr7:70598008-70597
836:2;6442/chr16:757:chr16:3017515-3017363:2;6443/chr16:757:chr16:3017515-3017363:1;6444/chr7:2591:ch
r7:70598008-70597836:1;6445/chr19:566:chr19:2290728-2290568:2;6446/chr19:566:chr19:2290728-2290568:
1;6447/chr14:704:chr14:62217978-62217804:1;6448/chr7:4544:chr7:155596210-155596039:2;6449/chr7:4544:
chr7:155596210-155596039:1;6450/chr10:2698:chr10:102586948-102586807:2;6451/chr10:2698:chr10:102586
948-102586807:1;6452/chr20:2056:chr20:57766820-57766645:2;6453/chr20:2056:chr20:57766820-57766645:1;
6454/cg05920961:chr14:102248354-102248194:2;6455/cg05920961:chr14:102248354-102248194:1;6456/chr
11:2301:chr11:63767797-63767650:2;6457/chr11:2301:chr11:63767797-63767650:1;6458/chr7:2162:chr7:5034
3702-50343543:2;6459/chr7:2162:chr7:50343702-50343543:1;6460/cg23777958:chr8:85095763-85095638:2;6
461/cg23777958:chr8:85095763-85095638:1;6462/chr5:829:chr5:3595692-3595517:2;6463/chr13:1076:chr13:1
00641503-100641333:2;6464/chr6:107:chr6:1394011-1393840:2;6465/chr6:107:chr6:1394011-1393840:1;6466/
chr1:255:chr1:1567614-1567449:2;6467/chr1:255:chr1:1567614-1567449:1;6468/chr13:1076:chr13:100641503-
100641333:1;6469/chr14:322:chr14:36986901-36986740:2;6470/chr14:322:chr14:36986901-36986740:1;6471/
chr5:829:chr5:3595692-3595517:1;6472/chr20:534:chr20:21491516-21491359:2;6473/chr20:534:chr20:214915
16-21491359:1;6474/chr6:1534:chr6:41515955-41515818:2;6475/chr6:1534:chr6:41515955-41515818:1;6476/c
hr21:861:chr21:45577844-45577675:2;6477/chr21:861:chr21:45577844-45577675:1;6478/chr8:3322:chr8:1435
73119-143572953:2;6479/chr8:3322:chr8:143573119-143572953:1;6480/chr5:1812:chr5:77147970-77147806:2;
6481/chr5:1812:chr5:77147970-77147806:1;6482/chr15:2554:chr15:102030123-102029992:2;6483/chr15:2554:
chr15:102030123-102029992:1;6484/chr9:3297:chr9:139095111-139094957:2;6485/chr9:3297:chr9:13909511
1-139094957:1;6486/chr8:13:chr8:494509-494344:2;6487/chr8:13:chr8:494509-494344:1;6488/chr22:2705:chr2
2:50629383-50629218:2;6489/chr22:2705:chr22:50629383-50629218:1;6490/chr15:628:chr15:41787608-41787
467:2;6491/chr15:628:chr15:41787608-41787467:1;6492/chr1:7210:chr1:237206461-237206313:2;6493/chr1:7
210:chr1:237206461-237206313:1;6494/chr19:4915:chr19:58609563-58609438:2;6495/chr19:4915:chr19:5860
9563-58609438:1;6496/chr10:586:chr10:11060803-11060628:2;6497/chr10:586:chr10:11060803-11060628:1;6
498/chr20:1991:chr20:57224890-57224755:2;6499/chr20:1991:chr20:57224890-57224755:1;6500/chr10:3240:c
hr10:119494735-119494566:2;6501/chr10:3240:chr10:119494735-119494566:1;6502/chr2:4262:chr2:17699488
1-176994717:2;6503/chr2:4262:chr2:176994881-176994717:1;6504/chr1:3767:chr1:43250927-43250760:2;650
5/chr7:3616:chr7:130419167-130419000:2;6506/chr7:3616:chr7:130419167-130419000:1;6507/chr5:3858:chr5:
179244214-179244041:2;6508/chr5:3858:chr5:179244214-179244041:1;6509/chr20:1728:chr20:50722058-507
21930:2;6510/chr20:1728:chr20:50722058-50721930:1;6511/chr2:4127:chr2:172954892-172954727:2;6512/chr
2:4127:chr2:172954892-172954727:1;6513/chr5:3298:chr5:174159131-174159001:2;6514/chr5:3298:chr5:1741
59131-174159001:1;6515/chr2:4124:chr2:172952229-172952058:1;6516/chr22:294:chr22:20779947-20779778:
2;6517/chr18:280:chr18:11751968-11751832:2;6518/chr18:280:chr18:11751968-11751832:1;6519/chr7:3136:c
hr7:100318228-100318055:2;6520/chr7:3136:chr7:100318228-100318055:1;6521/chr3:649:chr3:22414266-224
14120:2;6522/chr3:649:chr3:22414266-22414120:1;6523/chr10:2140:chr10:81002879-81002710:2;6524/chr10:
2140:chr10:81002879-81002710:1;6525/chr22:294:chr22:20779947-20779778:1;6526/chr18:1613:chr18:76740
848-76740722:2;6527/chr18:1613:chr18:76740848-76740722:1;6528/chr4:1578:chr4:30723952-30723825:2;65
29/chr4:1578:chr4:30723952-30723825:1;6530/chr1:3953:chr1:47899693-47899545:1;6531/chr9:343:chr9:3481
0034-34809864:2;6532/chr9:343:chr9:34810034-34809864:1;6533/chr9:58:chr9:1050253-1050079:2;6534/chr9:
58:chr9:1050253-1050079:1;6535/cg07923233:chr1:76080755-76080581:1;6536/chr19:325:chr19:1302705-130
2530:1;6537/chr11:141:chr11:849413-849283:2;6538/chr11:141:chr11:849413-849283:1;6539/chr19:2725:chr1
9:31839922-31839749:2;6540/chr19:2725:chr19:31839922-31839749:1;6541/chr16:2668:chr16:58058730-5805
8572:2;6542/chr16:2668:chr16:58058730-58058572:1;6543/chr17:2375:chr17:46711576-46711403:2;6544/chr1
7:2375:chr17:46711576-46711403:1;6545/chr10:1133:chr10:35928995-35928820:2;6546/chr10:1133:chr10:359
28995-35928820:1;6547/chr4:1604:chr4:37246819-37246647:2;6548/chr4:1604:chr4:37246819-37246647:1;65
49/chr20:1381:chr20:44686224-44686050:2;6550/chr20:1381:chr20:44686224-44686050:1;6551/chr5:3133:chr
5:170878160-170878008:2;6552/chr5:3133:chr5:170878160-170878008:1;6553/chr1:3001:chr1:25255878-2525
5742:2;6554/chr1:3001:chr1:25255878-25255742:1;6555/chr2:3031:chr2:111876974-111876802:2;6556/chr11:
2488:chr11:65246454-65246279:2;6557/chr11:2488:chr11:65246454-65246279:1;6558/chr19:4904:chr19:5857
0745-58570573:2;6559/chr2:5206:chr2:236579517-236579378:2;6560/chr2:5206:chr2:236579517-236579378:1;
6561/chr17:2385:chr17:46796526-46796354:2;6562/chr17:2385:chr17:46796526-46796354:1;6563/chr7:3136:
chr7:100318493-100318348:2;6564/chr7:3136:chr7:100318493-100318348:1;6565/chr17:1813:chr17:35299612-
35299438:2;6566/chr19:367:chr19:1468463-1468290:2;6567/chr5:839:chr5:3602608-3602444:2;6568/chr5:839:
chr5:3602608-3602444:1;6569/chr16:2827:chr16:66613355-66613189:2;6570/chr16:2827:chr16:66613355-666
13189:1;6571/chr8:1738:chr8:55372241-55372068:2;6572/chr8:1738:chr8:55372241-55372068:1;6573/chr15:1
477:chr15:75248782-75248615:2;6574/chr12:428:chr12:6664866-6664692:2;6575/chr1:3867:chr1:45083235-45
083069:2;6576/chr1:3867:chr1:45083235-45083069:1;6577/chr12:1427:chr12:57619035-57618864:2;6578/chr1
2:1427:chr12:57619035-57618864:1;6579/chr12:428:chr12:6664866-6664692:1;6580/chr4:1403:chr4:13543953-
13543828:2;6581/chr4:1403:chr4:13543953-13543828:1;6582/chr2:4218:chr2:176948223-176948051:2;6583/c
hr2:4218:chr2:176948223-176948051:1;6584/chr4:1726:chr4:44449803-44449678:2;6585/chr4:1726:chr4:4444
9803-44449678:1;6586/chr16:4071:chr16:88442987-88442830:2;6587/chr10:1066:chr10:30348188-30348016:2;
6588/chr10:1066:chr10:30348188-30348016:1;6589/chr16:4071:chr16:88442987-88442830:1;6590/chr10:4269:
chr10:133109533-133109367:2;6591/chr10:4269:chr10:133109533-133109367:1;6592/chr19:4654:chr19:5559
8818-55598679:2;6593/chr19:4654:chr19:55598818-55598679:1;6594/chr4:1509:chr4:24801681-24801514:2;6
595/chr4:1509:chr4:24801681-24801514:1;6596/chr2:1903:chr2:63275975-63275807:2;6597/chr2:1903:chr2:63
275975-63275807:1;6598/chr3:138:chr3:8809868-8809739:2;6599/chr3:138:chr3:8809868-8809739:1;6600/chr
7:4109:chr7:150655406-150655279:2;6601/chr7:4109:chr7:150655406-150655279:1;6602/chr14:847:chr14:690
95125-69094951:1;6603/chr2:4191:chr2:175205271-175205110:2;6604/chr2:4191:chr2:175205271-175205110:
1;6605/cg22434409:chr4:21950872-21950708:2;6606/cg22434409:chr4:21950872-21950708:1;6607/chr10:279
5:chr10:103539232-103539067:2;6608/chr10:2795:chr10:103539232-103539067:1;6609/chr2:4269:chr2:17701
7395-177017221:2;6610/chr2:4269:chr2:177017395-177017221:1;6611/chr21:214:chr21:34442546-34442377:2;
6612/chr21:214:chr21:34442546-34442377:1;6613/chr22:2526:chr22:49969399-49969226:2;6614/chr9:3295:c
hr9:139093487-139093350:2;6615/chr9:3295:chr9:139093487-139093350:1;6616/chr4:391:chr4:2042574-2042
416:2;6617/chr4:391:chr4:2042574-2042416:1;6618/chr8:1408:chr8:38965189-38965059:2;6619/chr8:1408:chr
8:38965189-38965059:1;6620/chr17:550:chr17:4981619-4981455:1;6621/chrX:810:chrX:48684944-48684806:2;
6622/chrX:810:chrX:48684944-48684806:1;6623/chr20:516:chr20:21081964-21081794:1;6624/chr16:3863:chr
16:86962925-86962778:2;6625/chr16:3863:chr16:86962925-86962778:1;6626/chr13:260:chr13:25744959-2574
4792:2;6627/chr13:260:chr13:25744959-25744792:1;6628/chr1:1062:chr1:3310680-3310535:1;6629/chr3:2629:
chr3:138658626-138658498:2;6630/chr3:2629:chr3:138658626-138658498:1;6631/chr17:4139:chr17:77789414-
77789287:2;6632/chr17:4139:chr17:77789414-77789287:1;6633/chr13:1700:chr13:113764161-113763987:2;6
634/chr13:1700:chr13:113764161-113763987:1;6635/chr1:2371:chr1:16085950-16085815:2;6636/chr1:2371:ch
r1:16085950-16085815:1;6637/chr3:1010:chr3:45187917-45187789:2;6638/chr3:1010:chr3:45187917-4518778
9:1;6639/chr10:1066:chr10:30347877-30347702:2;6640/chr10:1066:chr10:30347877-30347702:1;6641/chr11:4
166:chr11:119211606-119211474:2;6642/chr11:4166:chr11:119211606-119211474:1;6643/chr4:1280:chr4:887
4635-8874505:2;6644/chr4:1280:chr4:8874635-8874505:1;6645/chr22:2526:chr22:49969399-49969226:1;6646/
chr10:2022:chr10:77156283-77156157:2;6647/chr10:2022:chr10:77156283-77156157:1;6648/chr1:1408:chr1:4
7145504714421:2;6649/chr1:1408:chr1:4714550-4714421:1;6650/chr6:1872:chr6:72892544-72892408:2;6651/
chr6:1872:chr6:72892544-72892408:1;6652/chr2:4572:chr2:209271606-209271469:2;6653/chr2:4572:chr2:209
271606-209271469:1;6654/chr10:4732:chr10:134844974-134844820:2;6655/chr10:4732:chr10:134844974-134
844820:1;6656/chr17:2173:chr17:43037339-43037212:2;6657/chr17:2173:chr17:43037339-43037212:1;6658/c
hr11:3337:chr11:72295824-72295699:2;6659/chr11:3337:chr11:72295824-72295699:1;6660/chr22:141:chr22:1
9512253-19512078:1;6661/chrX:504:chrX:21676692-21676518:1;6662/chr14:1032:chr14:75078523-75078378:
2;6663/chr14:1032:chr14:75078523-75078378:1;6664/chr5:1055:chr5:7850347-7850212:2;6665/chr5:1055:chr5:
7850347-7850212:1;6666/chr3:3077:chr3:181413442-181413268:2;6667/chr3:3077:chr3:181413442-18141326
8:1;6668/chr11:3337:chr11:72295574-72295401:2;6669/chr11:3337:chr11:72295574-72295401:1;6670/chr10:4
051:chr10:131757398-131757227:2;6671/chr10:4051:chr10:131757398-131757227:1;6672/chr5:1710:chr5:725
94527-72594392:2;6673/chr5:1710:chr5:72594527-72594392:1;6674/chr6:1567:chr6:4207217642072009:2;66
75/chr6:1567:chr6:42072176-42072009:1;6676/chr2:3031:chr2:111876974-111876802:1;6677/chr19:4904:chr1
9:58570745-58570573:1;6678/chr3:823:chr3:37494227-37494060:2;6679/chr3:823:chr3:37494227-37494060:1;
6680/chr16:756:chr16:3017149-3016977:2;6681/chr16:756:chr16:3017149-3016977:1;6682/chr17:1813:chr17:3
5299612-35299438:1;6683/chr19:367:chr19:1468463-1468290:1;6684/chr7:2143:chr7:4981328149813110:2;6
685/chr7:2143:chr7:49813281-49813110:1;6686/chr15:1477:chr15:75248782-75248615:1;6687/chr1:2566:chr1:
18434656-18434531:2;6688/chr1:2566:chr1:18434656-18434531:1;6689/chr21:948:chr21:45875778-45875652:
2;6690/chr21:948:chr21:45875778-45875652:1;6691/chr2:3075:chr2:114035498-114035371:2;6692/chr2:3075:
chr2:114035498-114035371:1;6693/chr1:4363:chr1:63785498-63785324:2;6694/chr1:4363:chr1:63785498-637
85324:1;6695/chr16:112:chr16:745166-745023:2;6696/chr16:112:chr16:745166-745023:1;6697/chr13:386:chr1
3:29107292-29107120:2;6698/chr13:386:chr13:29107292-29107120:1;6699/chr8:809:chr8:17270919-17270791:
2;6700/chr8:809:chr8:17270919-17270791:1;6701/chr1:4838:chr1:110754788-110754619:2;6702/chr1:4838:ch
r1:110754788-110754619:1;6703/chr5:511:chr5:1886462-1886336:1;6704/chr4:1265:chr4:8860121-8859985:2;
6705/chr4:1265:chr4:8860121-8859985:1;6706/chr7:547:chr7:1577317-1577190:2;6707/chr7:547:chr7:1577317-
1577190:1;6708/chr18:105:chr18:5890681-5890541:2;6709/chr18:105:chr18:5890681-5890541:1;6710/chr7:18
58:chr7:37487700-37487532:2;6711/chr7:1858:chr7:37487700-37487532:1;6712/cg25299895:chr13:28498161-
28497986:1;6713/chr19:3890:chr19:4715331147153136:2;6714/chr19:3890:chr19:4715331147153136:1;6715/
chr5:1718:chr5:72677488-72677363:2;6716/chr5:1718:chr5:72677488-72677363:1;6717/chr5:221:chr5:105933
0-1059156:1;6718/chr5:705:chr5:2751652-2751524:2;6719/chr5:705:chr5:2751652-2751524:1;6720/chr14:2327:
chr14:104622118-104621990:2;6721/chr14:2327:chr14:104622118-104621990:1;6722/chr22:1851:chr22:4647
4687-46474561:2;6723/chr22:1851:chr22:46474687-46474561:1;6724/chr16:241:chr16:1041296-1041165:2;67
25/chr16:241:chr16:1041296-1041165:1;6726/chr2:3710:chr2:131721897-131721724:2;6727/chr2:3710:chr2:13
1721897-131721724:1;6728/chr2:4772:chr2:220313817-220313646:2;6729/chr2:4772:chr2:220313817-220313
646:1;6730/chrX:810:chrX:48685294-48685152:2;6731/chrX:810:chrX:48685294-48685152:1;6732/chr15:207:c
hr15:27112220-27112083:2;6733/chr15:207:chr15:27112220-27112083:1;6734/chr18:1054:chr18:57364452-57
364277:2;6735/chr19:2193:chr19:18771514-18771374:1;6736/chr8:3322:chr8:143573022-143572886:2;6737/c
hr8:3322:chr8:143573022-143572886:1;6738/chr18:1054:chr18:57364452-57364277:1;6739/chr15:937:chr15:5
8358141-58358016:2;6740/chr15:937:chr15:58358141-58358016:1;6741/chr17:2190:chr17:43198720-4319855
0:2;6742/chr17:2190:chr17:4319872043198550:1;6743/chr7:2143:chr7:4981333749813175:2;6744/chr7:2143:
chr7:49813337-49813175:1;6745/chr8:3702:chr8:145105505-145105375:1;6746/chr11:5:chr11:280314-280143:
2;6747/chr11:5:chr11:280314-280143:1;6748/chr20:1812:chr20:55202207-55202065:2;6749/chr20:1812:chr20:
55202207-55202065:1;6750/chr6:317:chr6:7051823-7051655:2;6751/chr6:317:chr6:7051823-7051655:1;6752/c
hr7:4565:chr7:155744407-155744232:1;6753/cg04034767:chr12:52400977-52400841:2;6754/cg04034767:chr1
2:52400977-52400841:1;6755/chr13:699:chr13:53174467-53174336:2;6756/chr13:699:chr13:53174467-531743
36:1;6757/chr11:2774:chr11:68145602-68145477:1;6758/chr16:1124:chr16:9107382-9107231:2;6759/chr16:11
24:chr16:9107382-9107231:1;6760/chr1:3767:chr1:43250927-43250760:1;6761/chr15:1832:chr15:83953184-83
953010:2;6762/chr15:1832:chr15:83953184-83953010:1;6763/chr10:3443:chr10:124894939-124894769:2;6764/
chr10:3443:chr10:124894939-124894769:1;6765/chr12:428:chr12:6665303-6665165:2;6766/chr12:428:chr12:6
665303-6665165:1;6767/chr1:7209:chr1:237205587-237205414:2;6768/chr1:7209:chr1:237205587-237205414:
1;6769/chr3:2172:chr3:124860761-124860615:2;6770/chr3:2172:chr3:124860761-124860615:1;6771/chr17:253
7:chr17:48546777-48546609:2;6772/chr17:2537:chr17:48546777-48546609:1;6773/chr17:550:chr17:4981769-4
981595:2;6774/chr17:550:chr17:4981769-4981595:1;6775/chr2:4251:chr2:176987309-176987147:2;6776/chr2:
4251:chr2:176987309-176987147:1;6777/chr1:3370:chr1:32827550-32827380:2;6778/chr1:3370:chr1:3282755
0-32827380:1;6779/chr3:2753:chr3:147111704-147111529:2;6780/chr3:2753:chr3:147111704-147111529:1;67
81/chr2:4287:chr2:177043176-177043007:2;6782/chr2:4287:chr2:177043176-177043007:1;6783/chr14:2758:ch
r14:105944557-105944401:2;6784/chr14:2758:chr14:105944557-105944401:1;6785/chr12:3126:chr12:1309092
20-130909058:2;6786/chr12:3126:chr12:130909220-130909058:1;6787/chr15:1558:chr15:76639697-76639572:
2;6788/chr15:1558:chr15:76639697-76639572:1;6789/chr9:3751:chr9:140681418-140681249:1;6790/chr12:146
2:chr12:58131446-58131273:2;6791/chr12:1462:chr12:58131446-58131273:1;6792/chr10:3746:chr10:1295373
18-129537167:2;6793/chr10:3746:chr10:129537318-129537167:1;6794/chr9:47:chr9:976857-976684:2;6795/ch
r9:47:chr9:976857-976684:1;6796/chr10:4582:chr10:134598798-134598673:2;6797/chr10:4582:chr10:1345987
98-134598673:1;6798/chr14:157:chr14:24780604-24780434:2;6799/chr14:157:chr14:24780604-24780434:1;68
00/chr6:1630:chr6:43252901-43252734:2;6801/chr6:1630:chr6:43252901-43252734:1;6802/chr10:1956:chr10:7
3847266-73847140:2;6803/chr19:158:chr19:863185-863010:2;6804/chr19:158:chr19:863185-863010:1;6805/ch
r12:1090:chr12:50355414-50355286:2;6806/chr12:1090:chr12:50355414-50355286:1;6807/chr10:1956:chr10:7
3847266-73847140:1;6808/chr4:1403:chr4:13543849-13543707:1;6809/chr14:625:chr14:59931204-59931061:1;
6810/chr11:2620:chr11:66886080-66885906:2;6811/chr11:2620:chr11:66886080-66885906:1;6812/chr13:657:
chr13:49795530-49795359:2;6813/chr13:657:chr13:49795530-49795359:1;6814/chr8:2423:chr8:120220830-12
0220670:2;6815/chr8:2423:chr8:120220830-120220670:1;6816/chr9:2923:chr9:137967528-137967353:2;6817/
chr19:2540:chr19:30017269-30017097:2;6818/chr19:2540:chr19:30017269-30017097:1;6819/chr9:2923:chr9:1
37967528-137967353:1;6820/chr17:715:chr17:7287370-7287196:2;6821/chr17:715:chr17:7287370-7287196:1;
6822/chr19:4357:chr19:52223159-52222988:2;6823/chr19:4357:chr19:52223159-52222988:1;6824/chr1:3659:c
hr1:39957684-39957540:2;6825/chr1:3659:chr1:39957684-39957540:1;6826/chr5:1664:chr5:66462327-664621
55:1;6827/chr18:105:chr18:5890548-5890382:2;6828/chr18:105:chr18:5890548-5890382:1;6829/chr10:3506:ch
r10:125651454-125651279:2;6830/chr10:3506:chr10:125651454-125651279:1;6831/chr20:1810:chr20:5520149
5-55201349:2;6832/chr15:1205:chr15:68122515-68122343:2;6833/chr15:1205:chr15:68122515-68122343:1;68
34/chr3:1611:chr3:65342300-65342125:2;6835/chr3:1611:chr3:65342300-65342125:1;6836/chr20:1810:chr20:5
5201495-55201349:1;6837/chr3:1158:chr3:48699153-48698986:2;6838/chr3:1158:chr3:48699153-48698986:1;
6839/chr10:4752:chr10:134862637-134862480:1;6840/chr16:2379:chr16:51168611-51168469:2;6841/chr16:23
79:chr16:51168611-51168469:1;6842/chr1:135:chr1:1118671-1118528:2;6843/chr1:135:chr1:1118671-1118528:
1;6844/chr19:1881:chr19:15580815-15580649:2;6845/chr19:1881:chr19:15580815-15580649:1;6846/chr2:428
4:chr2:177036815-177036682:1;6847/chr1:4364:chr1:63785814-63785670:1;6848/chr17:965:chr17:10102363-1
0102224:2;6849/chr17:965:chr17:10102363-10102224:1;6850/chr4:1604:chr4:37246898-37246733:2;6851/chr1:
4640:chr1:91301852-91301681:2;6852/chr1:4640:chr1:91301852-91301681:1;6853/chr1:971:chr1:3155292-31
55119:2;6854/chr1:971:chr1:3155292-3155119:1;6855/chr2:598:chr2:5832671-5832497:2;6856/chr2:598:chr2:5
832671-5832497:1;6857/chr2:4269:chr2:177017327-177017154:2;6858/chr22:1790:chr22:46263196-46263057:
2;6859/chr7:1788:chr7:35293784-35293621:2;6860/chr7:1788:chr7:35293784-35293621:1;6861/chr5:1679:chr5:
68711295-68711120:2;6862/chr5:1679:chr5:68711295-68711120:1;6863/chr22:1873:chr22:46500451-4650028
1:2;6864/chr22:1873:chr22:46500451-46500281:1;6865/chr17:2349:chr17:46604695-46604541:2;6866/chr17:2
349:chr17:46604695-46604541:1;6867/chr11:1212:chr11:13031032-13030857:2;6868/chr11:1212:chr11:13031
032-13030857:1;6869/chr5:3695:chr5:178422228-178422056:2;6870/chr5:3695:chr5:178422228-178422056:1;
6871/chr14:2833:chr14:106320581-106320455:2;6872/chr14:2833:chr14:106320581-106320455:1;6873/chr19:
3840:chr19:46518586-46518446:2;6874/chr19:3840:chr19:46518586-46518446:1;6875/chr2:5245:chr2:237082
107-237081962:1;6876/chr1:254:chr1:1566795-1566623:1;6877/chr22:2722:chr22:50706465-50706291:2;6878/
chr22:2722:chr22:50706465-50706291:1;6879/chr4:759:chr4:5710322-5710190:2;6880/chr4:759:chr4:5710322-
5710190:1;6881/chr12:1460:chr12:58130055-58129888:2;6882/chr12:1460:chr12:58130055-58129888:1;6883/
chr8:33:chr8:638251-638120:2;6884/chr8:33:chr8:638251-638120:1;6885/chr4:1604:chr4:37246898-37246733:
1;6886/chr2:4269:chr2:177017327-177017154:1;6887/chr22:1790:chr22:46263196-46263057:1;6888/chr20:90:
chr20:1784635-1784508:2;6889/chr20:90:chr20:1784635-1784508:1;6890/chr5:1664:chr5:66462378-66462241:
2;6891/chr5:1664:chr5:66462378-66462241:1;6892/chr6:21:chr6:391986-391859:2;6893/chr6:21:chr6:391986-3
91859:1;6894/chr7:562:chr7:1626297-1626123:1;6895/chr11:2492:chr11:65314648-65314482:1;6896/chr11:36
63:chr11:94134617-94134444:1;6897/cg23142394:chr12:72665842-72665678:1;6898/chr10:3131:chr10:11803
1131-118030959:2;6899/chr10:3131:chr10:118031131-118030959:1;6900/chr2:1519:chr2:39187616-39187481:
2;6901/chr2:1519:chr2:39187616-39187481:1;6902/chr21:59:chr21:19617319-19617176:2;6903/chr21:59:chr21:
19617319-19617176:1;6904/chr12:1757:chr12:95942130-95941961:2;6905/chr12:1757:chr12:95942130-95941
961:1;6906/chr19:322:chr19:1295797-1295624:2;6907/chr19:322:chr19:1295797-1295624:1;6908/chr19:1696:c
hr19:13210007-13209854:2;6909/chr19:1696:chr19:13210007-13209854:1;6910/chr3:2880:chr3:156544442-15
6544312:2;6911/chr16:4191:chr16:88701359-88701234:2;6912/chr16:4191:chr16:88701359-88701234:1;6913/
chr3:2880:chr3:156544442-156544312:1;6914/chr6:279:chr6:6004447-6004321:2;6915/chr6:279:chr6:6004447-
6004321:1;6916/chr17:279:chr17:1962404-1962231:2;6917/chr17:279:chr17:1962404-1962231:1;6918/chr3:10
10:chr3:45188092-45187928:2;6919/chr3:1010:chr3:45188092-45187928:1;6920/chr20:2677:chr20:61638258-6
1638084:2;6921/chr20:2677:chr20:61638258-61638084:1;6922/chr8:565:chr8:8560013-8559838:2;6923/chr8:5
65:chr8:8560013-8559838:1;6924/chr13:368:chr13:28674285-28674159:2;6925/chr13:368:chr13:28674285-286
74159:1;6926/chr2:5240:chr2:237078584-237078417:1;6927/chr20:1381:chr20:44686146-44685971:2;6928/chr
20:1381:chr20:44686146-44685971:1;6929/chr2:4288:chr2:177053961-177053792:2;6930/chr2:4288:chr2:1770
53961-177053792:1;6931/chr10:3456:chr10:124909280-124909106:2;6932/chr10:3456:chr10:124909280-1249
09106:1;6933/chr22:1865:chr22:46484982-46484808:1;6934/chr8:42:chr8:689086-688916:2;6935/chr8:42:chr8:
689086-688916:1;6936/chr10:2309:chr10:88123490-88123361:2;6937/chr10:2309:chr10:88123490-88123361:1;
6938/chr12:1858:chr12:104610007-104609837:2;6939/chr12:1858:chr12:104610007-104609837:1;6940/chr10:
1587:chr10:52177955-52177792:2;6941/chr10:1587:chr10:52177955-52177792:1;6942/chr18:1804:chr18:7738
9526-77389351:2;6943/chr18:1804:chr18:77389526-77389351:1;6944/cg24371075:chr17:8533483-8533318:1;
6945/chr12:2900:chr12:127630688-127630531:2;6946/chr12:2900:chr12:127630688-127630531:1;6947/chr19:
4075:chr19:49575789-49575636:2;6948/chr19:4075:chr19:49575789-49575636:1;6949/chr7:4816:chr7:157477
806-157477638:2;6950/chr7:4816:chr7:157477806-157477638:1;6951/chr4:1265:chr4:8860228-8860099:2;695
2/chr4:1265:chr4:8860228-8860099:1;6953/chr6:596:chr6:19837840-19837707:2;6954/chr6:596:chr6:19837840-
19837707:1;6955/chr14:1435:chr14:93154672-93154497:2;6956/chr14:1435:chr14:93154672-93154497:1;695
7/chr4:1509:chr4:24801918-24801782:2;6958/chr4:1509:chr4:24801918-24801782:1;6959/chr10:524:chr10:809
7648-8097507:2;6960/chr10:524:chr10:8097648-8097507:1;6961/chr18:92:chr18:5543635-5543510:2;6962/chr
18:92:chr18:5543635-5543510:1;6963/chr4:241:chr4:1537856-1537687:2;6964/chr4:241:chr4:1537856-153768
7:1;6965/chr12:1169:chr12:52627282-52627115:2;6966/chr12:1169:chr12:52627282-52627115:1;6967/chr7:43
03:chr7:152623133-152622977:2;6968/chr7:4303:chr7:152623133-152622977:1;6969/chr20:2210:chr20:59827
381-59827242:2;6970/chr20:2210:chr20:59827381-59827242:1;6971/chr11:461:chr11:1864088-1863913:1;697
2/chr16:2474:chr16:54970577-54970429:2;6973/chr16:2474:chr16:54970577-54970429:1;6974/chr1:4363:chr1:
63785715-63785590:2;6975/chr1:4363:chr1:63785715-63785590:1;6976/chr8:96:chr8:876975-876850:2;6977/c
hr8:96:chr8:876975-876850:1;6978/chr22:163:chr22:19712189-19712031:2;6979/chr22:163:chr22:19712189-1
9712031:1;6980/chr19:4944:chr19:58907831-58907705:2;6981/chr19:4944:chr19:58907831-58907705:1;6982/
chr12:1090:chr12:50354909-50354776:2;6983/chr12:1090:chr12:50354909-50354776:1;6984/chr1:4051:chr1:5
0887227-50887061:2;6985/chr1:4051:chr1:50887227-50887061:1;6986/chr19:2639:chr19:30866417-30866285:
2;6987/chr19:2639:chr19:30866417-30866285:1;6988/chr19:1986:chr19:17008587-17008422:2;6989/chr19:198
6:chr19:17008587-17008422:1;6990/chr17:534:chr17:4803076-4802951:2;6991/chr17:534:chr17:4803076-4802
951:1;6992/chr1:4363:chr1:63785419-63785248:2;6993/chr1:4363:chr1:63785419-63785248:1;6994/chr10:274
0:chr10:102900085-102899927:2;6995/chr10:2740:chr10:102900085-102899927:1;6996/chr12:1427:chr12:576
18793-57618624:2;6997/chr12:1427:chr12:57618793-57618624:1;6998/chr14:2764:chr14:105953781-1059536
22:2;6999/chr14:2764:chr14:105953781-105953622:1;7000/chr2:1990:chr2:66672796-66672671:2;7001/chr2:1
990:chr2:66672796-66672671:1;7002/chr3:2383:chr3:128211165-128211020:2;7003/chr3:2383:chr3:12821116
5-128211020:1;7004/chr15:1832:chr15:83953816-83953648:2;7005/chr18:610:chr18:34833804-34833645:2;70
06/chr18:610:chr18:34833804-34833645:1;7007/chr12:1171:chr12:52652435-52652289:2;7008/chr12:1171:chr
12:52652435-52652289:1;7009/chr5:2253:chr5:132158758-132158611:2;7010/chr5:2253:chr5:132158758-1321
58611:1;7011/chr11:98:chr11:627097-626964:2;7012/chr11:98:chr11:627097-626964:1;7013/chr2:599:chr2:583
3018-5832848:2:7014/chr2:599:chr2:5833018-5832848:1;7015/chr20:525:chr20:21377389-21377222:2;7016/ch
r20:525:chr20:21377389-21377222:1;7017/chr10:2424:chr10:94822729-94822566:2;7018/chr10:2424:chr10:94
822729-94822566:1;7019/chr4:1747:chr4:48485336-48485192:2;7020/chr4:1747:chr4:48485336-48485192:1;7
021/eg16302790:chr13:28498478-28498312:1;7022/cg02914087:chr19:12267802-12267629:1;7023/chr4:1265:
chr4:8860496-8860352:2;7024/chr4:1265:chr4:8860496-8860352:1;7025/chr19:4357:chr19:52223231-5222307
2:1;7026/chr6:2249:chr6:108439156-108439028:2;7027/chr6:2249:chr6:108439156-108439028:1;7028/chr1:48
61:chr1:111217129-111216966:2;7029/chr15:1832:chr15:83953816-83953648:1;7030/chr1:4861:chr1:1112171
29-111216966:1;7031/chr17:859:chr17:8926822-8926658:2;7032/chr17:859:chr17:8926822-8926658:1;7033/ch
r13:289:chr13:26625717-26625560:2;7034/chr13:289:chr13:26625717-26625560:1;7035/chr17:534:chr17:4802
879-4802720:2;7036/chr17:534:chr17:4802879-4802720:1;7037/chr1:691:chr1:2777435-2777274:1;7038/chr7:3
586:chr7:129421964-129421839:2;7039/chr1:4566:chr1:86622652-86622486:1;7040/chr17:1003:chr17:111442
90-11144155:2;7041/chr17:1003:chr17:11144290-11144155:1;7042/chr19:759:chr19:3435387-3435231:2;7043/
chr19:759:chr19:3435387-3435231:1;7044/chr7:3586:chr7:129421964-129421839:1;7045/chr5:827:chr5:35947
99-3594626:2;7046/chr5:827:chr5:3594799-3594626:1;7047/chr1:3957:chr1:47905040-47904908:2;7048/chr1:3
957:chr1:47905040-47904908:1;7049/chr3:333:chr3:13115024-13114899:2;7050/chr3:333:chr3:13115024-1311
4899:1;7051/chr7:1887:chr7:38670916-38670742:2;7052/chr7:1887:chr7:38670916-38670742:1;7053/chr2:418
3:chr2:175200801-175200635:2;7054/chr2:4183:chr2:175200801-175200635:1;7055/chr18:566:chr18:3102055
6-31020413:2;7056/chr18:566:chr18:31020556-31020413:1;7057/chr20:2212:chr20:59828696-59828571:2;705
8/chr20:2212:chr20:59828696-59828571:1;7059/chr14:986:chr14:73958336-73958174:2;7060/chr14:986:chr14:
73958336-73958174:1;7061/chr9:135:chr9:8857751-8857626:2;7062/chr9:135:chr9:8857751-8857626:1;7063/c
hr6:279:chr6:6004341-6004181:2;7064/chr6:279:chr6:6004341-6004181:1;7065/chr13:85:chr13:20876202-208
76036:2;7066/chr13:85:chr13:20876202-20876036:1;7067/chr8:1971:chr8:72460393-72460220:2;7068/chr8:19
71:chr8:72460393-72460220:1;7069/chr14:688:chr14:61747073-61746948:2;7070/chr14:688:chr14:61747073-6
1746948:1;7071/chr10:4583:chr10:134599342-134599181:2;7072/chr10:4583:chr10:134599342-134599181:1;7
073/chr5:2325:chr5:134364461-134364301:2;7074/chr5:2325:chr5:134364461-134364301:1;7075/chr17:275:ch
r17:1960642-1960505:2;7076/chr17:275:chr17:1960642-1960505:1;7077/chr8:38:chr8:687491-687318:2;7078/c
hr8:38:chr8:687491-687318:1;7079/chr6:1972:chr6:84419038-84418886:2;7080/chr6:1972:chr6:84419038-844
18886:1;7081/chr17:2799:chr17:59474611-59474474:2;7082/chr17:2799:chr17:59474611-59474474:1;7083/chr
1:1739:chr1:7022201-7022032:2;7084/chr1:1739:chr1:7022201-7022032:1;7085/chr6:3358:chr6:168502135-16
8502006:2;7086/chr6:3358:chr6:168502135-168502006:1;7087/chr18:585:chr18:32847415-32847277:2;7088/c
hr18:585:chr18:32847415-32847277:1;7089/chr2:1181:chr2:24232849-24232692:2;7090/chr2:1181:chr2:24232
849-24232692:1;7091/chr7:282:chr7:751835-751668:2;7092/chr7:282:chr7:751835-751668:1;7093/chr4:1405:c
hr4:13545975-13545813:2;7094/chr4:1405:chr4:13545975-13545813:1;7095/chr15:628:chr15:41787903-41787
736:1;7096/chr21:1265:chr21:47062703-47062554:2;7097/chr21:1265:chr21:47062703-47062554:1;7098/chr10:
4582:chr10:134598866-134598703:2;7099/chr10:4582:chr10:134598866-134598703:1;7100/chr6:2190:chr6:10
5389528-105389355:2;7101/chr6:2190:chr6:105389528-105389355:1;7102/chr9:1070:chr9:96714098-9671393
7:2;7103/chr9:1070:chr9:96714098-96713937:1;7104/chr7:1788:chr7:35294102-35293946:2;7105/chr7:1788:ch
r7:35294102-35293946:1;7106/cg24185576:chr11:30607499-30607360:2;7107/cg24185576:chr11:30607499-3
0607360:1;7108/chr6:1002:chr6:31466255-31466101:2;7109/chr6:1002:chr6:31466255-31466101:1

TABLE 4
chr1:762994-763035/OR4F16 (−140981), SAMD11 (−98106); chr1:859962-859978/SAMD11 (−1151); chr1:89521
3-895398/KLHL17 (−661), NOC2L (−627); chr1:932385-932531/HES4 (+3094), KLHL17 (+36491); chr1:933552-
933904/HES4 (+1824), KLHL17 (+37761); chr1:955941-955967/AGRN (+451); chr1:968387-968443/AGRN (+1
2912), RNF223 (+41272); chr1:968885-968911/AGRN (+13395), RNF223 (+40789); chr1:969239-969501/AGR
N (+13867), RNF223 (+40317); chr1:969618-969692/AGRN (+14152), RNF223 (+40032); chr1:975520-975561/
AGRN (+20038), RNF223 (+34146); chr1:975943-975968/AGRN (+20453), RNF223 (+33731); chr1:976069-97
6090/AGRN (+20577), RNF223 (+33607); chr1:1015298-1015348/RNF223 (−5636), C1orf159 (+36413); chr1:10
51331-1051363/C1orf159 (+389); chr1:1118474-1118533/TTLL10 (+9218), TNFRSF18 (+23585); chr1:1118729-
1118849/TTLL10 (+9503), TNFRSF18 (+23300); chr1:1148296-1148327/TNFRSF18 (−6223), TNFRSF4 (+123
6); chr1:1149103-1149146/TNFRSF4 (+423); chr1:1242645-1242698/PUSL1 (−1322), ACAP3 (+597); chr1:1260
013-1260039/GLTPD1 (−117), CPSF3L (+20); chr1:1260434-1260490/CPSF3L (−416), GLTPD1 (+319); chr1:12
90444-1290466/DVL1 (−5963), MXRA8 (+3460); chr1:1335160-1335207/CCNL2 (−466); chr1:1362229-1362339/
TMEM88B (+776); chr1:1362978-1362991/VWA1 (−7918), TMEM88B (+1477); chr1:1369615-1369678/VWA1
(−1256); chr1:1475085-1475208/TMEM240 (+593); chr1:1475940-1476114/TMEM240 (−287); chr1:1510494-1510
559/SSU72 (−265); chr1:1534767-1534828/SSU72 (−24536), MIB2 (−15997); chr1:1564532-1564676/MMP23B
(−2956); chr1:1564793-1564890/MMP23B (−2718); chr1:1566136-1566482/MMP23B (−1251); chr1:1566652-1566
698/MMP23B (−885); chr1:1590406-1590458/MMP23B (+22872), SLC35E2B (+33811); chr1:1590669-1590738/
MMP23B (+23144), SLC35E2B (+33539); chr1:1714005-1714067/NADK (−2528); chr1:1822233-1822263/GNB1
(+278); chr1:1822457-1822503/GNB1 (+46); chr1:1830580-1830692/CALML6 (−15630), GNB1 (−8110); chr1:18
50862-1850928/TMEM52 (−155); chr1:1935207-1935231/TMEM52 (−84479), GABRD (−15549); chr1:2080330-2
080382/SKI (−79778), PRKCZ (+98447); chr1:2137205-2137236/SKI (−22913), PRKCZ (+155312); chr1:214479
8-2144854/SKI (−15308), PRKCZ (+162917); chr1:2232143-2232194/RER1 (−91045), SKI (+72035); chr1:22323
29-2232390/RER1 (−90854), SKI (+72226); chr1:2246101-2246227/RER1 (−77050), SKI (+86030); chr1:234727
5-2347344/PEX10 (−3300); chr1:2460496-2460580/PANK4 (−2503); chr1:2705906-2706307/TTC34 (+123); chr1:
2706452-2706722/TTC34 (−357); chr1:2773473-2773565/ACTRT2 (−164527), TTC34 (−67289); chr1:2804568-2
804672/ACTRT2 (−133426), TTC34 (−98390); chr1:2805351-2805482/ACTRT2 (−132629), TTC34 (−99187); chr1:
2889963-2890046/TTC34 (−183775), ACTRT2 (−48041); chr1:2929018-2929064/TTC34 (−222811), ACTRT2 (−9
005); chr1:2987562-2987628/ARHGEF16 (−383552), PRDM16 (+1853); chr1:2987741-2987819/ARHGEF16 (−3
83367), PRDM16 (+2038); chr1:2989596-2989682/ARHGEF16 (−381508), PRDM16 (+3897); chr1:2990108-299
0150/ARHGEF16 (−381018), PRDM16 (+4387); chr1:2990262-2990371/ARHGEF16 (−380830), PRDM16 (+457
5); chr1:3013166-3013246/ARHGEF16 (−357941), PRDM16 (+27464); chr1:3077622-3077834/ARHGEF16 (−29
3419), PRDM16 (+91986); chr1:3164348-3164430/ARHGEF16 (−206758), PRDM16 (+178647); chr1:3310286-3
310316/ARHGEF16 (−60846), PRDM16 (+324559); chr1:3310671-3310755/ARHGEF16 (−60434), PRDM16 (+3
24971); chr1:3454818-3454857/MEGF6 (+73221), ARHGEF16 (+83691); chr1:3513849-3513883/MEGF6 (+141
93), ARHGEF16 (+142719); chr1:3528416-3528466/MEGF6 (−382); chr1:3528679-3528749/MEGF6 (−655); chr
1:3540767-3540810/TPRG1L (−767); chr1:3566445-3566487/TP73 (−2663), WRAP73 (+205); chr1:3567345-356
7572/TP73 (−1670), WRAP73 (−788); chr1:3567851-3567882/TP73 (−1262), WRAP73 (−1196); chr1:3595011-35
95134/LOC388588 (−94279), TP73 (+25944); chr1:3623318-3623338/LOC388588 (−66024), TP73 (+54199); chr
1:3659643-3659671/LOC388588 (−29695), TP73 (+90528); chr1:4714075-4714163/AJAP1 (−986); chr1:471436
5-4714488/AJAP1 (−678); chr1:4714973-4714990/AJAP1 (−123); chr1:4715120-4715192/AJAP1 (+51); chr1:471
5540-4715574/AJAP1 (+452); chr1:5819215-5819307/NPHP4 (+233272); chr1:5896886-5896970/NPHP4 (+155
605); chr1:6053562-6053624/NPHP4 (−1060); chr1:6054807-6054916/NPHP4 (−2329); chr1:6086714-6086839/
NPHP4 (−34244), KCNAB2 (−19204); chr1:6231012-6231088/CHD5 (+9144), KCNAB2 (+125069); chr1:6295552-
6295610/ICMT (+463); chr1:6305736-6305783/HES3 (+1508), GPR153 (+15275); chr1:6306075-6306125/HES
3 (+1848), GPR153 (+14935); chr1:6306305-6306351/HES3 (+2076), GPR153 (+14707); chr1:6306574-630661
3/HES3 (+2342), GPR153 (+14441); chr1:6500988-6501054/ESPN (+16173), TNFRSF25 (+25234); chr1:65147
48-6514803/TNFRSF25 (+11479), ESPN (+29928); chr1:6515011-6515220/TNFRSF25 (+11139), ESPN (+302
68); chr1:6515623-6515713/TNFRSF25 (+10587), ESPN (+30820); chr1:6515884-6515944/TNFRSF25 (+1034
1), ESPN (+31066); chr1:6520633-6520682/TNFRSF25 (+5597), ESPN (+35810); chr1:6526054-6526181/TNF
RSF25 (+137); chr1:6545194-6545271/TNFRSF25 (−18978), PLEKHG5 (+12251); chr1:6569575-6569604/PLE
KHG5 (−12106), NOL9 (+45068); chr1:6640291-6640359/ZBTB48 (+262); chr1:6640942-6641091/ZBTB48 (+95
4); chr1:6663681-6663729/KLHL21 (−776); chr1:6672767-6672834/PHF13 (−955); chr1:6846220-6846273/CAM
TA1 (+863); chr1:7022107-7022260/VAMP3 (−809145), CAMTA1 (+176800); chr1:7311136-7311191/VAMP3
(−520165), CAMTA1 (+465780); chr1:7705516-7705676/VAMP3 (−125733), CAMTA1 (+860212); chr1:8214951-8
214962/SLC45A1 (−169433), ERRFI1 (−128564); chr1:8938599-8938656/ENO1 (+523); chr1:9188906-9188943/
GPR157 (+304); chr1:9189668-9189741/GPR157 (−476); chr1:9295012-9295050/H6PD (+168); chr1:9380768-9
380799/SLC25A33 (−218744), SPSB1 (+27843); chr1:9648776-9648796/TMEM201 (−146); chr1:9883572-98836
61/CLSTN1 (+933); chr1:9884358-9884395/CLSTN1 (+173); chr1:10698898-10698908/CASZ1 (+157804), PEX
14 (+163900); chr1:10776484-10776650/CASZ1 (+80140), PEX14 (+241564); chr1:10948713-10948746/TARD
BP (−123949), CASZ1 (−92023); chr1:11539996-11540039/PTCHD2 (+723); chr1:11540179-11540380/PTCHD2
(+985); chr1:11751815-11751903/MAD2L2 (−181), C1orf187 (+78); chr1:11752161-11752230/MAD2L2 (−518),
C1orf187 (+415); chr1:11841615-11841704/MTHFR (+24500), AGTRAP (+45518); chr1:11968137-11968197/N
PPB (−49175), KIAA2013 (+18318); chr1:12079233-12079273/TNFRSF8 (−44181), MFN2 (+39015); chr1:12656
131-12656174/DHRS3 (+21667), VPS13D (+366040); chr1:13839769-13840077/LRRC38 (+319); chr1:1391024
8-13910310/PDPN (+27); chr1:13910757-13910793/PDPN (+523); chr1:15438947-15439012/TMEM51 (−41249),
KAZN (+513767); chr1:15510330-15510412/EFHD2 (−226020), TMEM51 (+30142); chr1:15672511-15672605/
EFHD2 (−63833), TMEM51 (+192329); chr1:15943864-15943882/DDI2 (−80); chr1:16084772-16084839/FBLIM1
(−449); chr1:16091589-16091633/FBLIM1 (+6356), UQCRHL (+42583); chr1:16301902-16301938/ZBTB17 (+7
07); chr1:16390527-16390626/CLCNKA (+42091), EPHA2 (+92005); chr1:16489198-16489265/EPHA2 (−6650),
ARHGEF19 (+49872); chr1:16533170-16533207/EPHA2 (−50607), ARHGEF19 (+5915); chr1:16553455-16553
469/ARHGEF19 (−14358), RSG1 (+10197); chr1:16553732-16553812/ARHGEF19 (−14668), RSG1 (+9887); chr
1:16554045-16554167/ARHGEF19 (−15002), RSG1 (+9553); chr1:16693976-16694028/RSG1 (−130343), SPAT
A21 (+69917); chr1:16767360-16767418/SPATA21 (−3470), NECAP2 (+222); chr1:16825858-16825876/NECAP
2 (+58700), NBPF1 (+114115); chr1:16970919-16970980/NBPF1 (−30968), MST1P9 (+120025); chr1:16974002-
16974084/NBPF1 (−34061), MST1P9 (+116932); chr1:16974638-16974676/NBPF1 (−34675), MST1P9 (+11631
8); chr1:16974784-16974806/NBPF1 (−34813), MST1P9 (+116180); chr1:17019473-17019717/NBPF1 (−79613),
MST1P9 (+71380); chr1:17033884-17033938/NBPF1 (−93929), MST1P9 (+57064); chr1:17066681-17066880/
NBPF1 (−126799), MST1P9 (+24194); chr1:17215440-17215476/MST1P9 (−124483), CROCC (−32987); chr1:17
446446-17446534/PADI2 (−542); chr1:17764306-17764355/RCC2 (+728); chr1:17764769-17764798/RCC2 (+2
75); chr1:18017856-18017907/ACTL8 (−63926), ARHGEF10L (+151552); chr1:18434311-18434366/IGSF21 (+9
9); chr1:18434539-18434705/IGSF21 (+382); chr1:18436999-18437043/KLHDC7A (−370403), IGSF21 (+2781);
chr1:18872535-18872691/PAX7 (−84887), KLHDC7A (+65189); chr1:18956611-18956738/PAX7 (−825); chr1:18
958229-18958358/PAX7 (+794); chr1:18959390-18959455/PAX7 (+1923), TAS1R2 (+226732); chr1:19029607-
19029659/PAX7 (+72133), TAS1R2 (+156522); chr1:19043067-19043114/PAX7 (+85591), TAS1R2 (+143064);
chr1:19043743-19043756/PAX7 (+86250), TAS1R2 (+142405); chr1:19110642-19110720/TAS1R2 (+75474), P
AX7 (+153181); chr1:19145857-19145925/TAS1R2 (+40264), PAX7 (+188391); chr1:19283333-19283381/ALD
H4A1 (−54064), UBR4 (+253389); chr1:19536544-19536560/UBR4 (+194); chr1:19600727-19600931/AKR7L
(−261); chr1:19615510-19615552/AKR7A3 (−251); chr1:19971439-19971472/HTR6 (−20324), NBL1 (+1733); chr1:
19992155-19992177/HTR6 (+386); chr1:19992313-19992417/HTR6 (+585); chr1:19992563-19992634/HTR6
(+819); chr1:20669848-20669896/VWA5B1 (+52460), CAMK2N1 (+142856); chr1:20692927-20692995/VWA5B1
(+75549), CAMK2N1 (+119767); chr1:20693106-20693136/VWA5B1 (+75709), CAMK2N1 (+119607); chr1:207
58203-20758297/CAMK2N1 (+54478), VWA5B1 (+140838); chr1:20810838-20810864/CAMK2N1 (+1877), VW
A5B1 (+193439); chr1:20811189-20811219/CAMK2N1 (+1524), VWA5B1 (+193792); chr1:20813197-20813270/
CAMK2N1 (−506); chr1:20879229-20879255/MUL1 (−44568), CDA (−36202); chr1:20879437-20879462/MUL1
(−44776), CDA (−35994); chr1:21619997-21620131/ECE1 (−3298); chr1:21671913-21671961/NBPF3 (−94694), E
CE1 (−55171); chr1:21754782-21754847/ECE1 (−138049), NBPF3 (−11816); chr1:21755148-21755187/ECE1
(−138402), NBPF3 (−11463); chr1:21763035-21763091/NBPF3 (−3568); chr1:21835733-21835765/ALPL (−109); c
hr1:21949101-21949127/RAP1GAP (+29234), ALPL (+113256); chr1:22109678-22109702/USP48 (−2); chr1:22
150158-22150183/LDLRAD2 (+11413), HSPG2 (+113579); chr1:22230557-22230636/HSPG2 (+33153), LDLR
AD2 (+91839); chr1:22379702-22379736/CDC42 (+599); chr1:22890180-22890189/EPHA8 (+181); chr1:23036
849-23036910/EPHB2 (−451); chr1:23037541-23037595/EPHB2 (+237); chr1:23280037-23280074/KDM1A (−65
885), EPHB2 (+242725); chr1:23280180-23280206/KDM1A (−65748), EPHB2 (+242862); chr1:23543794-23543
840/HTR1D (−22595), HNRNPR (+127036); chr1:23750467-23750535/TCEA3 (+760); chr1:23895042-23895062/
RPL11 (−123217), ID3 (−8767); chr1:24018253-24018289/RPL11 (+2); chr1:24127250-24127261/GALE (−1196);
chr1:24229435-24229535/FUCA1 (−34626), CNR2 (+10332); chr1:24286150-24286192/PNRC2 (−130); chr1:24
286404-24286446/PNRC2 (+124); chr1:24514552-24514568/IL28RA (−795); chr1:24882910-24882960/C1orf13
0 (+368); chr1:25071680-25071744/CLIC4 (−48); chr1:25258830-25258871/RUNX3 (−2081); chr1:25944438-259
44497/MAN1C1 (+509); chr1:25944639-25944655/MAN1C1 (+688); chr1:26097907-26098032/SEPN1 (−28697),
MAN1C1 (+154011); chr1:26201821-26201959/PAQR7 (−4146); chr1:26362261-26362312/SLC30A2 (+10317),
EXTL1 (+14016); chr1:26551625-26551728/CEP85 (−9016), CATSPER4 (+34558); chr1:26611720-26611776/
SH3BGRL3 (+5535), UBXN11 (+21447); chr1:26686401-26686447/AIM1L (−5803), ZNF683 (+12842); chr1:267
37883-26737907/LIN28A (+626); chr1:26827410-26827464/RPS6KA1 (−44906), HMGN2 (+28535); chr1:26948
206-26948270/ARID1A (−74284), RPS6KA1 (+75895); chr1:27160117-27160209/SFN (−29470), ZDHHC18 (+69
62); chr1:27286230-27286282/TRNP1 (−33939), NUDC (+38032); chr1:27328450-27328591/TRNP1 (+8326), S
LC9A1 (+152930); chr1:27481545-27481604/SLC9A1 (−124); chr1:27684181-27684240/MAP3K6 (+9126), SYT
L1 (+15728); chr1:27687148-27687522/MAP3K6 (+6002), SYTL1 (+18852); chr1:27693115-27693151/MAP3K6
(+204); chr1:27709609-27709757/CD164L2 (+122); chr1:27816367-27816423/WASF2 (+283); chr1:27816552-
27816581/WASF2 (+111); chr1:27895023-27895063/WASF2 (−78365), AHDC1 (+35100); chr1:27895384-2789
5491/WASF2 (−78760), AHDC1 (+34705); chr1:27961738-27961831/FGR (−58); chr1:28052394-28052491/IFI6
(−53719), STX12 (−47251); chr1:28157246-28157274/PPP1R8 (+8); chr1:28240713-28240793/RPA2 (+483); chr
1:28523842-28523916/PTAFR (−20424), DNAJC8 (+35663); chr1:28559145-28559213/ATPIF1 (−3423), DNAJC
8 (+363); chr1:28562180-28562219/DNAJC8 (−2658), ATPIF1 (−402); chr1:28562521-28562549/DNAJC8 (−2993),
ATPIF1 (−67); chr1:28586935-28586972/SESN2 (+991); chr1:28908150-28908234/RAB42 (−10815), TRNAU1
AP (+28663); chr1:29101930-29102028/OPRD1 (−36675), YTHDF2 (+38846); chr1:29213480-29213517/EPB41
(−104); chr1:29240814-29240835/EPB41 (+27222), TMEM200B (+209596); chr1:30815417-30815454/MATN1
(+380996); chr1:31538461-31538499/PUM1 (+84); chr1:31846725-31846761/FABP3 (−820); chr1:31867849-318
67886/FABP3 (−21945), SERINC2 (−18095); chr1:32180821-32180905/COL16A1 (−11095), BAI2 (+48785); chr1:
32226328-32226372/COL16A1 (−56582), BAI2 (+3298); chr1:32237546-32237638/BAI2 (−7944), SPOCD1 (+43
988); chr1:32479942-32479992/KHDRBS1 (+476); chr1:32671668-32671715/DCDC2B (−3003); chr1:32706690-
32706729/LCK (−33002), EIF3I (+18751); chr1:32716826-32716885/LCK (−22856), EIF3I (+28897); chr1:328272
92-32827307/TSSK3 (−562); chr1:33116692-33116715/RBBP4 (−45); chr1:33160877-33160910/SYNC (+7467),
RBBP4 (+44145); chr1:33220273-33220322/S100PBP (−62878), SYNC (−51937); chr1:33336598-33336635/YA
RS (−52984), FNDC5 (+1465); chr1:33352206-33352236/HPCA (+123); chr1:33438420-33438467/RNF19B (−81
58), AK2 (+64068); chr1:33772843-33772856/ZNF362 (+50676), PHC2 (+68344); chr1:33772957-33772986/ZN
F362 (+50798), PHC2 (+68222); chr1:33896824-33896927/PHC2 (−55682), ZSCAN20 (−41356); chr1:34631825-
34631871/CSMD2 (−973); chr1:34632501-34632613/CSMD2 (−1682); chr1:34642490-34642518/C1orf94 (−49);
chr1:34642668-34642712/C1orf94 (+137); chr1:35396049-35396107/DLGAP3 (−25094), LOC653160 (+48229);
chr1:36023133-36023186/NCDN (−233), KIAA0319L (−123); chr1:36023578-36023591/KIAA0319L (−548), NCD
N (+192); chr1:36028848-36029009/TFAP2E (−10042), NCDN (+5536); chr1:36184673-36184746/PSMB2 (−772
65), CLSPN (+50841); chr1:36235405-36235461/CLSPN (+118); chr1:36590505-36590532/COL8A2 (−24669),
TRAPPC3 (+24548); chr1:36615366-36615406/TRAPPC3 (−319); chr1:36626769-36626846/THRAP3 (−63209),
MAP7D1 (+5005); chr1:36787012-36787144/FAM176B (+2677), THRAP3 (+97061); chr1:36787260-36787358/
FAM176B (+2446), THRAP3 (+97292); chr1:36788105-36788308/FAM176B (+1548), THRAP3 (+98190); chr1:3
6788555-36788583/FAM176B (+1186), THRAP3 (+98552); chr1:36929716-36929748/MRPS15 (+308); chr1:37
498568-37498597/CSF3R (−549668), GRIK3 (+1261); chr1:37498845-37498888/GRIK3 (+977); chr1:37499781-
37499937/GRIK3 (−15); chr1:37500575-37500602/GRIK3 (−745); chr1:37980503-37980552/MEAF6 (−164); chr1:
38100493-38100533/RSPO1 (+82); chr1:38158286-38158335/CDCA8 (+152); chr1:38230243-38230282/EPHA
10 (+561); chr1:38260161-38260192/MANEAL (+403); chr1:38397446-38397478/MTF1 (−72170), INPP5B (+15
267); chr1:38510734-38510773/POU3F1 (+1696), UTP11L (+32370); chr1:38511800-38511821/POU3F1 (+639);
chr1:38512114-38512126/POU3F1 (+330); chr1:38601959-38601996/POU3F1 (−89528), RRAGC (+723362);
chr1:39044059-39044095/POU3F1 (−531627), RRAGC (+281263); chr1:39281997-39282073/POU3F1 (−76958
5), RRAGC (+43305); chr1:39283653-39283677/POU3F1 (−771215), RRAGC (+41675); chr1:39958053-399581
79/BMP8A (+798); chr1:39980365-39980407/BMP8A (+23068), PABPC4 (+62135); chr1:39980848-39980867/B
MP8A (+23540), PABPC4 (+61663); chr1:39981066-39981411/BMP8A (+23921), PABPC4 (+61282); chr1:4007
5758-40075770/PABPC4 (−33243), HEYL (+29584); chr1:40137607-40137646/NT5C1A (+83); chr1:40149745-4
0149784/NT5C1A (−12055), HPCAL4 (+7324); chr1:40235990-40236124/OXCT2 (+963); chr1:40236305-40236
450/OXCT2 (+642); chr1:40236601-40236683/OXCT2 (+378); chr1:40236988-40237013/OXCT2 (+19); chr1:40
253802-40253944/BMP8B (+660); chr1:40254231-40254279/BMP8B (+278); chr1:40254807-40254922/BMP8B
(−332); chr1:40255043-40255068/BMP8B (−523); chr1:40367594-40367609/MYCL1 (+85); chr1:40426168-4042
6241/CAP1 (−80050), MFSD2A (+5421); chr1:40505783-40505910/CAP1 (−408); chr1:41061665-41061734/ZNF
684 (+64467), RIMS3 (+69624); chr1:41131376-41131403/RIMS3 (−66); chr1:41349795-41350136/CTPS (−950
41), CITED4 (−21948); chr1:41445900-41445968/CTPS (+927); chr1:41823898-41823992/SCMH1 (−116130), E
DN2 (+126399); chr1:41847253-41847296/SCMH1 (−139460), EDN2 (+103069); chr1:41848889-41848942/SC
MH1 (−141101), EDN2 (+101428); chr1:41962195-41962280/EDN2 (−11894), HIVEP3 (+422258); chr1:4220469
7-42204851/EDN2 (−254430), HIVEP3 (+179722); chr1:42385900-42385942/HIVEP3 (−1425); chr1:42501064-4
2501120/GUCA2B (−118000), HIVEP3 (−116596); chr1:42506846-42506887/HIVEP3 (−122371), GUCA2B (−112
225); chr1:43232852-43232901/LEPRE1 (−122); chr1:43251031-43251075/ERMAP (−40196), LEPRE1 (−18298);
chr1:43251223-43251297/ERMAP (−39989), LEPRE1 (−18505); chr1:43533983-43534114/SLC2A1 (−109202),
EBNA1BP2 (+104192); chr1:43919528-43919541/HYI (+125); chr1:44031699-44031737/KDM4A (−84079), PTP
RF (+35171); chr1:44399150-44399194/ARTN (+180); chr1:44402394-44402415/IPO13 (−10073), ARTN (+3413);
chr1:44872850-44872917/RNF220 (+1924), TMEM53 (+267215); chr1:44873185-44873501/RNF220 (+2383),
TMEM53 (+266756); chr1:44874031-44874080/RNF220 (+3096), TMEM53 (+266043); chr1:44874523-448745
65/RNF220 (+3584), TMEM53 (+265555); chr1:44883246-44883751/RNF220 (+12539), TMEM53 (+256600); c
hr1:44884123-44884203/RNF220 (+13203), TMEM53 (+255936); chr1:45097941-45097970/TMEM53 (+42143),
RNF220 (+226996); chr1:45098149-45098213/TMEM53 (+41918), RNF220 (+227221); chr1:45249966-452500
08/BEST4 (+3439), RPS8 (+8741); chr1:45250162-45250192/BEST4 (+3249), RPS8 (+8931); chr1:45275838-4
5275969/PLK3 (+9868), PTCH2 (+32712); chr1:45792990-45793076/HPDL (+488); chr1:45805611-45805624/
MUTYH (+169), TOE1 (+276); chr1:46216320-46216357/IPP (+146); chr1:46632362-46632464/PIK3R3 (−34033),
TSPAN1 (−8336); chr1:46859790-46859827/FAAH (−130); chr1:46913877-46913886/DMBX1 (−58786), FAAH
(+53943); chr1:46914246-46914285/DMBX1 (−58402), FAAH (+54327); chr1:46951557-46951644/DMBX1 (−210
67), FAAH (+91662); chr1:46956616-46956684/DMBX1 (−16018), FAAH (+96711); chr1:46958796-46958809/D
MBX1 (−13865), FAAH (+98864); chr1:47009886-47009910/KNCN (+6989), DMBX1 (+37230); chr1:47010036-4
7010104/KNCN (+6817), DMBX1 (+37402); chr1:47082533-47082554/MOB3C (−1739); chr1:47134198-471342
50/ATPAF1-AS1 (−3273), ATPAF1 (−125); chr1:47694422-47694529/TAL1 (−4706), TAL1 (+967); chr1:47694928-
47694979/TAL1 (+489); chr1:47696521-47696620/TAL1 (−1128); chr1:47696965-47696986/TAL1 (−1533); chr1:
47697255-47697279/TAL1 (−1824); chr1:47697947-47698006/TAL1 (−2534); chr1:47882643-47882696/FOXE3
(+926); chr1:47899977-47900005/FOXD2 (−1698); chr1:47900136-47900264/FOXD2 (−1489); chr1:47904458-4
7904495/FOXD2 (+2788), LOC388630 (+558085); chr1:47904774-47905009/FOXD2 (+3203), LOC388630 (+55
7670); chr1:47905110-47905132/FOXD2 (+3432), LOC388630 (+557441); chr1:47910625-47910748/FOXD2
(+8998), LOC388630 (+551875); chr1:47911335-47911423/FOXD2 (+9690), LOC388630 (+551183); chr1:479118
31-47911977/FOXD2 (+10215), LOC388630 (+550658); chr1:48058793-48058946/FOXD2 (+157181), LOC388
630 (+403692); chr1:48175006-48175027/FOXD2 (+273328), LOC388630 (+287545); chr1:48463262-4846328
5/LOC388630 (−712); chr1:50680452-50680531/ELAVL4 (+105898), DMRTA2 (+208627); chr1:50799317-5079
9393/DMRTA2 (+89764), ELAVL4 (+224761); chr1:50880798-50880931/DMRTA2 (+8254), ELAVL4 (+306271);
chr1:50881317-50881426/DMRTA2 (+7747), ELAVL4 (+306778); chr1:50881957-50882143/DMRTA2 (+7069),
ELAVL4 (+307456); chr1:50883977-50884020/DMRTA2 (+5120), ELAVL4 (+309405); chr1:50884353-5088469
0/DMRTA2 (+4597), ELAVL4 (+309928); chr1:50884888-50885248/DMRTA2 (+4051), ELAVL4 (+310474); chr1:
50890649-50890795/DMRTA2 (−1603); chr1:50892284-50892336/DMRTA2 (−3191); chr1:50893423-50893518/
DMRTA2 (−4352); chr1:51810628-51810669/TTC39A (+136); chr1:52194878-52194940/OSBPL9 (+112363), N
RD1 (+149700); chr1:52195290-52195348/OSBPL9 (+112773), NRD1 (+149290); chr1:52834298-52834344/O
RC1 (+35822), ZFYVE9 (+226275); chr1:53308660-53308907/ZYG11A (+601); chr1:53528134-53528170/POD
N (+428); chr1:53528963-53528990/PODN (+1253), SLC1A7 (+79312); chr1:53686074-53686227/C1orf123 (+1
38); chr1:53703966-53704002/MAGOH (+298); chr1:54040869-54040940/DMRTB1 (+115833), GLIS1 (+15897
2); chr1:54203484-54203516/GLIS1 (−3623); chr1:54203673-54203727/GLIS1 (−3823); chr1:54411420-5441145
5/HSPB11 (−150); chr1:54518348-54518407/TCEANC2 (−896), TMEM59 (+733); chr1:54587512-54587534/CD
CP2 (+31920), TCEANC2 (+68249); chr1:54665620-54665659/MRPL37 (−200), CYB5RL (+106); chr1:5466603
0-54666097/CYB5RL (−318), MRPL37 (+224); chr1:54941131-54941169/ACOT11 (−72657), SSBP3 (−69058); c
hr1:57110663-57110714/PRKAA2 (−301); chr1:58715327-58715359/DAB1 (+868); chr1:58715855-58715978/D
AB1 (+294); chr1:59041846-59041919/OMA1 (−29437), TACSTD2 (+1283); chr1:59165706-59165743/MYSM1
(+22); chr1:60280341-60280394/HOOK1 (−165); chr1:60539349-60539399/C1orf87 (+68); chr1:61509226-61509
262/C1orf87 (−969802), NFIA (−38290); chr1:61519405-61519472/C1orf87 (−979997), NFIA (−28095); chr1:6220
8262-62208291/INADL (+128); chr1:62660769-62660785/USP1 (−241198), INADL (+452628); chr1:62661447-6
2661507/USP1 (−240498), INADL (+453328); chr1:63785309-63785375/FOXD3 (−3388); chr1:63785530-63785
592/FOXD3 (−3169); chr1:63785866-63785973/FOXD3 (−2810); chr1:63787249-63787282/FOXD3 (−1464); chr1:
63788827-63788860/FOXD3 (+114); chr1:63789792-63789849/ALG6 (−43440), FOXD3 (+1091); chr1:6378999
4-63790029/ALG6 (−43249), FOXD3 (+1282); chr1:63792179-63792231/ALG6 (−41056), FOXD3 (+3475); chr1:
63792649-63792797/ALG6 (−40538), FOXD3 (+3993); chr1:64240452-64240532/ROR1 (+802); chr1:65210646-
65210695/RAVER2 (−107); chr1:65210908-65210939/RAVER2 (+146); chr1:65533027-65533077/JAK1 (−10086
5), AK4 (−80180); chr1:65731599-65731658/LEPR (−154502), DNAJC6 (+1199); chr1:65991019-65991119/PDE
4B (−267787), LEPROT (+104938); chr1:65991561-65991605/PDE4B (−267273), LEPROT (+105452); chr1:659
91758-65991783/PDE4B (−267085), LEPROT (+105640); chr1:66257994-66258064/PDE4B (−827); chr1:66258
651-66258671/PDE4B (−195); chr1:67773981-67774115/IL12RB2 (+1001), SERBP1 (+122075); chr1:68298383-
68298403/GNG12 (+762); chr1:71172259-71172299/CTH (+295378), PTGER3 (+341212); chr1:72749700-727
49731/NEGR1 (−1311); chr1:75198767-75198840/TYW3 (−32), CRYZ (+288); chr1:75593969-75594000/LHX8
(−134); chr1:75595759-75595818/LHX8 (+1670), SLC44A5 (+481010); chr1:75595991-75596135/LHX8 (+1944),
SLC44A5 (+480736); chr1:75596859-75596929/LHX8 (+2775), SLC44A5 (+479905); chr1:75601119-75601187/
LHX8 (+7034), SLC44A5 (+475646); chr1:76190696-76190728/ACADM (+669); chr1:77333434-77333579/ST6
GALNAC5 (+321); chr1:77333992-77334168/ST6GALNAC5 (+894); chr1:77334386-77334408/ST6GALNAC5
(+1211), PIGK (+350735); chr1:77334757-77334795/ST6GALNAC5 (+1590), PIGK (+350356); chr1:78149314-7
8149403/ZZZ3 (−1016); chr1:78956792-78956874/PTGFR (+105); chr1:82266419-82266440/LPHN2 (+348); chr
1:82267678-82267739/LPHN2 (+1627); chr1:84326316-84326357/TTLL7 (+138496); chr1:85156177-85156237/
SSX2IP (+33); chr1:85358637-85358663/LPAR3 (+246); chr1:86042234-86042275/CYR61 (−4189); chr1:86043
397-86043466/CYR61 (−3012); chr1:86047024-86047064/CYR61 (+600); chr1:86081822-86081862/CYR61 (+3
5398), ZNHIT6 (+92274); chr1:86622685-86622770/COL24A1 (−574); chr1:86861605-86861650/ODF2L (+397);
chr1:87598103-87598318/LOC339524 (+531); chr1:87617313-87617385/LMO4 (−176802), LOC339524 (+1966
9); chr1:89990298-89990331/LRRC8B (−82); chr1:90228947-90228980/LRRC8D (−58516), LRRC8C (+130320);
chr1:91176597-91176691/BARHL2 (+6150), ZNF326 (+715966); chr1:91183611-91183775/BARHL2 (−899); ch
r1:91185309-91185347/BARHL2 (−2534); chr1:91190949-91190984/BARHL2 (−8173), ZNF644 (+296845); chr1:
91191235-91191289/BARHL2 (−8468), ZNF644 (+296550); chr1:91192577-91192681/BARHL2 (−9835), ZNF64
4 (+295183); chr1:91196195-91196225/BARHL2 (−13416), ZNF644 (+291602); chr1:91300907-91301161/BAR
HL2 (−118240), ZNF644 (+186778); chr1:91301739-91301814/BARHL2 (−118983), ZNF644 (+186035); chr1:91
306983-91307069/BARHL2 (−124232), ZNF644 (+180786); chr1:91966929-91966982/CDC7 (+552); chr1:92351
813-92351932/TGFBR3 (−37); chr1:94312394-94312456/BCAR3 (−165040), DNTTIP2 (+32337); chr1:94703078-
94703103/ARHGAP29 (+216); chr1:95392843-95392887/CNN3 (−130); chr1:98386567-98386618/DPYD (+22);
chr1:99469697-99469759/LPPR5 (+721); chr1:99470062-99470211/LPPR5 (+312); chr1:99470530-99470582/
LPPR5 (−107); chr1:99730323-99730351/LPPR4 (+489); chr1:100315730-100315854/AGL (+152); chr1:100715
383-100715426/DBT (+4); chr1:101004817-101004842/VCAM1 (−180366), GPR88 (+1102); chr1:106623467-10
6623545/PRMT6 (−975761); chr1:108023398-108023440/NTNG1 (+340790), VAV3 (+484126); chr1:108507077-
108507148/VAV3 (+432); chr1:108507376-108507494/VAV3 (+110); chr1:108507607-108507657/VAV3 (−87);
chr1:109506074-109506105/CLCC1 (+21); chr1:109584013-109584056/CLCC1 (−77924), TAF13 (+34589); chr
1:109633398-109633440/TMEM167B (+16); chr1:110026078-110026126/CYB561D1 (−10599), SYPL2 (+17002);
chr1:110527168-110527248/AHCYL1 (−179); chr1:110610328-110610423/ALX3 (+2946), FAM40A (+33135);
chr1:110610898-110611045/ALX3 (+2350), FAM40A (+33731); chr1:110611277-110611434/ALX3 (+1966), FA
M40A (+34115); chr1:110611966-110612129/ALX3 (+1274), FAM40A (+34807); chr1:110612692-110612963/A
LX3 (+494); chr1:110613273-110613301/ALX3 (+35); chr1:110626528-110626677/UBL4B (−28459), ALX3 (−132
81); chr1:110693497-110693736/SLC6A17 (+485); chr1:110753220-110753325/KCNC4 (−63); chr1:110753894-
110753957/KCNC4 (+590); chr1:110754357-110754632/RBM15 (−127450), KCNC4 (+1159); chr1:110754736-1
10754761/RBM15 (−127196), KCNC4 (+1413); chr1:111216979-111217139/KCNA3 (+596); chr1:111217892-11
1217923/KCNA3 (−253); chr1:111813739-111813750/CHIA (−19739), CHI3L2 (+43464); chr1:111991844-11199
1885/WDR77 (−35), ATP5F1 (+122); chr1:112058194-112058222/RAP1A (−104197), ADORA3 (−11465); chr1:11
2058347-112058396/RAP1A (−104033), ADORA3 (−11629); chr1:112162239-112162273/RAP1A (−149); chr1:11
2281121-112281180/DDX20 (−17039), RAP1A (+118746); chr1:112532077-112532114/KCND3 (−319); chr1:113
052166-113052213/WNT2B (+820); chr1:113286689-113286742/FAM19A3 (+23527), SLC16A1 (+212259); chr
1:113286892-113287134/FAM19A3 (+23824), SLC16A1 (+211962); chr1:113933279-113933305/MAGI3 (−183);
chr1:114448128-114448169/AP4B1 (−624), DCLRE1B (+234); chr1:114695737-114695799/SYT6 (+704); chr1:
114696183-114696349/SYT6 (+206); chr1:114696464-114696540/SYT6 (−30); chr1:115259504-115259566/NR
AS (−20); chr1:115300208-115300249/CSDE1 (+442); chr1:115300536-115300575/CSDE1 (+115); chr1:115632
640-115632692/TSPAN2 (−545); chr1:115880795-115880872/NGF (+23); chr1:115881043-115881248/NGF (−2
89); chr1:117602388-117602424/TTF2 (−543); chr1:117602625-117602704/TTF2 (−284); chr1:117664354-1176
64407/TRIM45 (+30); chr1:118471804-118471866/WDR3 (−537), GDAP2 (+467); chr1:119521927-119521978/
SPAG17 (−794105), TBX15 (+10226); chr1:119522435-119522565/SPAG17 (−794652), TBX15 (+9679); chr1:11
9522854-119522925/SPAG17 (−795042), TBX15 (+9289); chr1:119527064-119527236/SPAG17 (−799302), TB
X15 (+5029); chr1:119527788-119527820/SPAG17 (−799956), TBX15 (+4375); chr1:119529337-119529378/SP
AG17 (−801510), TBX15 (+2821); chr1:119529912-119530005/SPAG17 (−802111), TBX15 (+2220); chr1:11953
0149-119530201/SPAG17 (−802327), TBX15 (+2004); chr1:119530508-119530553/SPAG17 (−802683), TBX15
(+1648); chr1:119532043-119532317/TBX15 (−1); chr1:119532772-119532924/TBX15 (−669); chr1:119535721-
119535907/TBX15 (−3635); chr1:119542200-119542216/TBX15 (−10029), WARS2 (+141087); chr1:119542994-
119543069/TBX15 (−10853), WARS2 (+140263); chr1:119543215-119543273/TBX15 (−11065), WARS2 (+1400
51); chr1:119549735-119549914/TBX15 (−17646), WARS2 (+133470); chr1:119550721-119551013/TBX15 (−18
688), WARS2 (+132428); chr1:120190450-120190519/ZNF697 (−95); chr1:120906200-120906245/NOTCH2 (−2
93906), FCGR1B (+29721); chr1:121137945-121137965/FCGR1B (−202011); chr1:121138946-121139009/FCG
R1B (−203034); chr1:121261239-121261403/FCGR1B (−325377); chr1:143912982-143913019/PPIAL4G (−1451
20), PPIAL4A (+451245); chr1:144594151-144594207/PPIAL4A (−229933), PDE4DIP (+400854); chr1:1450754
83-145075577/PDE4DIP (−80497), SEC22B (−20877); chr1:145075788-145075897/PDE4DIP (−80810), SEC22B
(−20564); chr1:145562808-145562833/PIAS3 (−13167), ITGA10 (+37831); chr1:145575168-145575231/PIAS3
(−788); chr1:146544203-146544272/PRKAB2 (+99891), KIAA1245 (+210048); chr1:146552529-146552566/PRK
AB2 (+91581), KIAA1245 (+218358); chr1:147142740-147142781/ACP6 (−127); chr1:147532653-147532666/N
BPF11 (+91809), GPR89B (+132154); chr1:147752953-147753060/NBPF11 (−128538), PPIAL4A (+202412); ch
r1:147775413-147775495/NBPF11 (−150985), PPIAL4A (+179965); chr1:147775887-147776019/NBPF11 (−151
484), PPIAL4A (+179466); chr1:147806865-147806906/NBPF11 (−182417), PPIAL4A (+148533); chr1:1478071
41-147807168/NBPF11 (−182686), PPIAL4A (+148264); chr1:148241136-148241157/NBPF15 (−319700), PPIA
L4F (−38611); chr1:148247950-148248139/NBPF15 (−312802), PPIAL4F (−45509); chr1:148901829-148901905/
PPIAL4B (−651136), PPIAL4F (+95852); chr1:149146950-149147117/PPIAL4B (−405969), PPIAL4F (+341019);
chr1:149147470-149147509/PPIAL4B (−405513), PPIAL4F (+341475); chr1:149156198-149156460/PPIAL4B
(−396674), PPIAL4F (+350314); chr1:149194465-149194595/PPIAL4B (−358473), PPIAL4F (+388515); chr1:1496
08326-149608355/FCGR1A (−145909), PPIAL4B (+55338); chr1:150039729-150039791/VPS45 (+418); chr1:15
0121581-150121636/PLEKHO1 (−561); chr1:150487531-150487603/ADAMTSL4 (−34331), ECM1 (+7080); chr1:
150951761-150951855/CERS2 (−4329), ANXA9 (−2691); chr1:150980816-150980853/PRUNE (−138), FAM63A
(+19); chr1:151103905-151104036/SEMA6C (+15169), GABPB2 (+60891); chr1:151118185-151118236/SEMA6
C (+929); chr1:151300049-151300116/PI4KB (+108); chr1:151319341-151319406/RFX5 (+395); chr1:1518104
38-151810653/RORC (−6198), THEM5 (+15627); chr1:151810815-151810937/RORC (−6528), THEM5 (+15297);
chr1:151811160-151811259/RORC (−6862), THEM5 (+14963); chr1:151811939-151811996/RORC (−7620), T
HEM5 (+14205); chr1:152080035-152080074/TCHHL1 (−18515), TCHH (+6532); chr1:152080962-152081017/T
CHHL1 (−19450), TCHH (+5597); chr1:152082054-152082178/TCHHL1 (−20576), TCHH (+4471); chr1:1521615
07-152161520/RPTN (−29810), HRNR (+35155); chr1:152487957-152487999/LCE5A (+4658), LCE3E (+51270);
chr1:153233586-153233649/LOR (+1439), PGLYRP3 (+49576); chr1:153233862-153233925/LOR (+1715), P
GLYRP3 (+49300); chr1:153234048-153234099/LOR (+1895), PGLYRP3 (+49120); chr1:153643197-15364323
4/ILF2 (+263); chr1:153650810-153650908/NPR1 (−305); chr1:153700216-153700255/INTS3 (−331); chr1:1537
00398-153700438/INTS3 (−149); chr1:153963252-153963300/RAB13 (−4470), RPS27 (+37); chr1:154297990-1
54298038/ATP8B2 (−2262); chr1:154298153-154298253/ATP8B2 (−2073); chr1:154474778-154474987/TDRD1
0 (+188); chr1:154475201-154475370/TDRD10 (+591); chr1:154540419-154540455/CHRNB2 (+180); chr1:154
971620-154971706/ZBTB7B (−3539); chr1:155022988-155023026/ADAM15 (−755); chr1:155023698-155023736/
ADAM15 (−45); chr1:155054922-155054944/EFNA1 (−45416), EFNA3 (+3585); chr1:155139428-155139547/DP
M3 (−26605), KRTCAP2 (+6316); chr1:155145342-155145416/TRIM46 (−981), KRTCAP2 (+425); chr1:1551458
95-155145936/TRIM46 (−444), KRTCAP2 (−112); chr1:155147262-155147320/KRTCAP2 (−1487), TRIM46 (+93
1); chr1:155163239-155163286/MUC1 (−557); chr1:155232041-155232078/SCAMP3 (+116); chr1:155242901-1
55242948/HCN3 (−4449), CLK2 (+356); chr1:155265440-155265457/PKLR (+5776), HCN3 (+18075); chr1:1552
90878-155290940/RUSC1 (+269); chr1:156046658-156046681/MEX3A (+5119), RAB25 (+15704); chr1:156051
245-156051284/MEX3A (+524); chr1:156131108-156131150/SLC25A44 (−32601), SEMA4A (+7807); chr1:1562
61339-156261354/C1orf85 (+4102), TMEM79 (+7277); chr1:156391216-156391242/C1orf61 (+8111), RHBG
(+52226); chr1:156405415-156405634/C1orf61 (−6185), MEF2D (+65004); chr1:156406071-156406104/C1orf61
(−6748), MEF2D (+64441); chr1:156475098-156475176/MEF2D (−4608); chr1:156595053-156595080/BCAN (−16
673), HAPLN2 (+5981); chr1:156595184-156595221/BCAN (−16537), HAPLN2 (+6117); chr1:156611573-15661
1643/BCAN (−132); chr1:156611944-156611993/BCAN (+229); chr1:156612417-156612468/BCAN (+703); chr1:
156627019-156627083/BCAN (+15311), NES (+20138); chr1:156646597-156646634/NES (+573); chr1:156698
409-156698430/ISG20L2 (−715), RRNAD1 (+157); chr1:156698692-156698747/ISG20L2 (−1015), RRNAD1 (+4
57); chr1:156814953-156815030/SH2D2A (−28352), INSRR (+13720); chr1:156815240-156815273/SH2D2A (−2
8617), INSRR (+13455); chr1:156830192-156830265/INSRR (−1517), NTRK1 (−442); chr1:156862981-1568630
61/PEAR1 (−502); chr1:156863486-156863640/PEAR1 (+40); chr1:156893765-156893791/PEAR1 (+30255), A
RHGEF11 (+121384); chr1:156893979-156894012/PEAR1 (+30473), ARHGEF11 (+121166); chr1:156897155-
156897211/PEAR1 (+33660), ARHGEF11 (+117979); chr1:157015354-157015395/ARHGEF11 (−213); chr1:157
108362-157108382/ETV3 (+11); chr1:157164713-157164942/ETV3 (−56445), FCRL5 (+357482); chr1:1579634
26-157963443/KIRREL (+372); chr1:159141156-159141216/CADM3 (−191); chr1:159141400-159141432/CADM
3 (+39); chr1:159141544-159141599/CADM3 (+195); chr1:159158369-159158471/DARC (−16629), CADM3 (+1
7043); chr1:159750646-159750677/DUSP23 (−97); chr1:159824301-159824348/VSIG8 (+8122), SLAMF8 (+278
46); chr1:160053688-160053727/KCNJ9 (+2348), IGSF8 (+14910); chr1:160313036-160313056/NCSTN (−17),
COPA (+308); chr1:161008341-161008733/F11R (−17404), USF1 (+7220); chr1:161039305-161039377/ARHG
AP30 (+419); chr1:161102320-161102383/DEDD (−96); chr1:161136510-161136567/PPOX (+358); chr1:16114
7104-161147155/B4GALT3 (+628); chr1:161275579-161275639/NR1I3 (−67609), MPZ (+4153); chr1:16142709
8-161427179/FCGR2A (−48066), SDHC (+142973); chr1:161494028-161494160/HSPA6 (+58); chr1:162760320-
162760355/HSD17B7 (−158); chr1:164290672-164290723/PBX1 (−237899), NUF2 (+998975); chr1:165204697-
165204732/LMX1A (+120763), PBX1 (+676118); chr1:165321787-165321942/LMX1A (+3613), PBX1 (+793268);
chr1:165322397-165322515/LMX1A (+3022), PBX1 (+793859); chr1:165323519-165323697/LMX1A (+1870),
PBX1 (+795011); chr1:165325357-165325394/LMX1A (+102); chr1:165326205-165326296/LMX1A (−773); chr1:
165600060-165600140/MGST3 (−10); chr1:165796721-165796731/UCK2 (−6); chr1:166134891-166134933/PO
GK (−673812), UCK2 (+338180); chr1:166845626-166845653/TADA1 (+14); chr1:166890502-166890534/TADA
1 (−44864), ILDR2 (+54043); chr1:166916921-166916936/TADA1 (−71275), ILDR2 (+27632); chr1:166917085-1
66917117/TADA1 (−71447), ILDR2 (+27460); chr1:167408552-167408657/CD247 (+79242), POU2F1 (+218539);
chr1:167683520-167683573/CREG1 (−160491), MPZL1 (−7640); chr1:167789443-167789489/ADCY10 (+939
87), MPZL1 (+98279); chr1:167906795-167906830/BRP44 (−506); chr1:169396689-169396730/SLC19A2 (+584
98), BLZF1 (+59516); chr1:169429656-169429697/SLC19A2 (+25531), BLZF1 (+92483); chr1:170500941-1705
00993/GORAB (−296); chr1:170630047-170630085/PRRX1 (−3247); chr1:170636193-170636326/C1orf129 (−26
8352), PRRX1 (+2947); chr1:170640625-170640664/C1orf129 (−263967), PRRX1 (+7332); chr1:171811287-17
1811320/DNM3 (+683); chr1:172413276-172413317/PIGC (−67); chr1:172502037-172502085/C1orf9 (−199); ch
r1:173446541-173446599/PRDX6 (+84); chr1:173793676-173793729/CENPL (−433), DARS2 (−94); chr1:17383
6894-173836941/ZBTB37 (−575); chr1:173991522-173991550/RABGAP1L (−137016), RC3H1 (−29326); chr1:17
3991670-173991713/RABGAP1L (−136860), RC3H1 (−29482); chr1:174129036-174129082/RABGAP1L (+507);
chr1:174969455-174969482/CACYBP (+577); chr1:175568405-175568494/TNR (+144302), TNN (+531456); ch
r1:176867049-176867110/ASTN1 (+266944), PAPPA2 (+434773); chr1:177133587-177133689/ASTN1 (+386);
chr1:177140174-177140304/FAM5B (−394); chr1:178456021-178456063/C1orf49 (−26170), RASAL2 (+393178);
chr1:178456229-178456271/C1orf49 (−25962), RASAL2 (+393386); chr1:179712339-179712410/FAM163A (+7
7); chr1:179712554-179712567/FAM163A (+263); chr1:179712734-179712830/FAM163A (+484); chr1:1797131
75-179713518/FAM163A (+1049), TOR1AIP2 (+133594); chr1:179796745-179796820/TOR1AIP2 (+50158), FA
M163A (+84485); chr1:179851482-179851494/TOR1AIP2 (−4547), TOR1AIP2 (−4547), TOR1AIP1 (+68); chr1:1
80123687-180123700/QSOX1 (−274); chr1:180202486-180202648/LHX4 (+3134), ACBD6 (+269455); chr1:180
203608-180203633/LHX4 (+4188), ACBD6 (+268401); chr1:180204620-180204897/LHX4 (+5326), ACBD6 (+2
67263); chr1:180601741-180601806/XPR1 (+628); chr1:180881835-180881864/STX6 (+110196), XPR1 (+2807
04); chr1:180991756-180991822/STX6 (+257); chr1:181074295-181074333/CACNA1E (−378372), MR1 (+7175
3); chr1:181287200-181287267/CACNA1E (−165452), MR1 (+284673); chr1:181452986-181453050/CACNA1E
(+332); chr1:182025892-182025928/ZNF648 (+4937), CACNA1E (+573224); chr1:182026429-182026506/ZNF6
48 (+4379), CACNA1E (+573782); chr1:182359697-182359742/GLUL (+819); chr1:182360203-182360247/GLU
L (+314); chr1:182584340-182584403/RGS16 (−10824), RGS8 (+57695); chr1:182921896-182921930/LAMC1
(−70682), DHX9 (+113474); chr1:182922125-182922163/LAMC1 (−70451), DHX9 (+113705); chr1:183155477-18
3155524/LAMC2 (+327); chr1:183386319-183386598/NMNAT2 (+1175), LAMC2 (+231285); chr1:183386827-1
83386946/NMNAT2 (+747); chr1:183387623-183387662/NMNAT2 (−9); chr1:183440578-183440605/SMG7 (−91
4); chr1:184122416-184122513/TSEN15 (+101654), EDEM3 (+601576); chr1:184942823-184942877/FAM129A
(+832); chr1:186344196-186344241/C1orf27 (−4680), TPR (+238); chr1:190447300-190447388/FAM5C (−585);
chr1:196847239-196847297/CFHR2 (−65666), CFHR1 (+58407); chr1:197115787-197115840/ASPM (+10); chr
1:197170352-197170406/ZBTB41 (−707); chr1:197744530-197744581/DENND1B (+67); chr1:197879661-1978
79716/DENND1B (−135066), LHX9 (−6828); chr1:197883137-197883189/LHX9 (−3354); chr1:197887067-19788
7146/LHX9 (+590); chr1:197887457-197887706/NEK7 (−238526), LHX9 (+1065); chr1:197888122-197888180/
NEK7 (−237957), LHX9 (+1634); chr1:197898262-197898343/NEK7 (−227805), LHX9 (+11786); chr1:20000490
8-200005016/FAM58BP (−177694), NR5A2 (+8192); chr1:200005189-200005253/FAM58BP (−177435), NR5A2
(+8451); chr1:200005355-200005431/FAM58BP (−177263), NR5A2 (+8623); chr1:200010525-200010649/FAM5
8BP (−172069), NR5A2 (+13817); chr1:200211892-200211942/FAM58BP (+29261), ZNF281 (+167249); chr1:2
00247655-200247745/FAM58BP (+65044), ZNF281 (+131466); chr1:200271341-200271373/FAM58BP (+8870
1), ZNF281 (+107809); chr1:200589714-200589747/KIF14 (+131); chr1:200638929-200638975/DDX59 (+174);
chr1:200842755-200842866/GPR25 (+645); chr1:200992738-200992796/KIF21B (+61); chr1:201084190-20108
4226/CACNA1S (−2514); chr1:201437664-201437682/PHLDA3 (+626); chr1:201450223-201450300/PHLDA3
(−11963), CSRP1 (+25705); chr1:201708835-201708891/IPO9 (−89425), NAV1 (+91413); chr1:201924492-20192
4571/TIMM17A (−87); chr1:201951865-201951934/RNPEP (+134); chr1:202130680-202130727/PTPN7 (+12); c
hr1:202168601-202168629/LGR6 (+5497), UBE2T (+142479); chr1:202678881-202678923/SYT2 (+649); chr1:
202780427-202780478/KDM5B (−2904); chr1:202780592-202780634/KDM5B (−3064); chr1:202968746-202968
818/CYB5R1 (−32378), TMEM183B (−7752); chr1:202996231-202996304/PPFIA4 (−7344), TMEM183B (+19734);
chr1:203044861-203045073/MYOG (+10410), PPFIA4 (+41355); chr1:203045220-203045250/MYOG (+10142),
PPFIA4 (+41623); chr1:203045509-203045696/MYOG (+9774), PPFIA4 (+41991); chr1:203296839-2032968
71/BTG2 (+22191), FMOD (+23434); chr1:203764634-203764721/ZBED6 (−1973), ZC3H11A (−73); chr1:203870
670-203870687/SOX13 (−171567), SNRPE (+39939); chr1:204653596-204653792/LRRN2 (+903); chr1:205180
345-205180410/DSTYK (+349); chr1:205290252-205290331/NUAK2 (+591); chr1:205312912-205312961/NUA
K2 (−22054), LEMD1 (+78277); chr1:205600493-205600518/SLC45A3 (+49124), MFSD4 (+62394); chr1:20668
0210-206680247/RASSF5 (−650); chr1:206837298-206837397/MAPKAPK2 (−21017), DYRK3 (+28467); chr1:20
7669273-207669321/CR1 (−176); chr1:207669788-207669828/CR1 (+335); chr1:207818397-207818433/CR1L
(−43); chr1:207818547-207818598/CR1L (+115); chr1:207818703-207818745/CR1L (+266); chr1:207842948-20
7843005/CD46 (−82406), CR1L (+24519); chr1:208042154-208042180/CD34 (+42516), CD46 (+116784); chr1:
208084004-208084031/CD34 (+665); chr1:208132523-208132675/CD34 (−47916), PLXNA2 (+285066); chr1:20
8132800-208132879/CD34 (−48157), PLXNA2 (+284825); chr1:208133086-208133143/CD34 (−48432), PLXNA
2 (+284550); chr1:208338101-208338196/CD34 (−253466), PLXNA2 (+79516); chr1:208417859-208417907/PL
XNA2 (−218); chr1:209405049-209405087/PLXNA2 (−987403), CAMK1G (−351977); chr1:209405301-20940531
4/PLXNA2 (−987643), CAMK1G (−351737); chr1:209848576-209848614/G0S2 (−75); chr1:209920995-20992104
6/TRAF3IP3 (−8373), HSD11B1 (+42885); chr1:209943069-209943168/TRAF3IP3 (+13725), IRF6 (+36401); chr
1:209979612-209979634/IRF6 (−103); chr1:210111211-210111283/SYT14 (−291); chr1:210111422-210111796/
SYT14 (+71); chr1:210111923-210112036/SYT14 (+442); chr1:211432060-211432123/RCOR3 (−616); chr1:211
848603-211848657/NEK2 (+342); chr1:212688095-212688359/ATF3 (−93743), NENF (+81998); chr1:21287372
4-212873750/BATF3 (−410); chr1:213124623-213124668/VASH2 (+759); chr1:214153408-214153558/PROX1
(−8377), RPS6KC1 (+928895); chr1:214156083-214156134/PROX1 (−5751), RPS6KC1 (+931521); chr1:214156
279-214156394/PROX1 (−5523), RPS6KC1 (+931749); chr1:214158911-214159036/PROX1 (−2886); chr1:2143
60859-214360926/SMYD2 (−93672), PROX1 (+199033); chr1:215256873-215256953/KCNK2 (+353); chr1:2169
77604-216977639/ESRRG (−80808), GPATCH2 (+826787); chr1:217307266-217307384/ESRRG (−410511), GP
ATCH2 (+497084); chr1:217310297-217310395/ESRRG (−413532), GPATCH2 (+494063); chr1:218520063-218
520095/LYPLAL1 (−827113), TGFB2 (+1403); chr1:218520292-218520309/LYPLAL1 (−826891), TGFB2 (+1625);
chr1:220101211-220101370/SLC30A10 (+702); chr1:220101613-220101674/SLC30A10 (+349); chr1:220101
804-220101864/SLC30A10 (+159); chr1:221049979-221050667/HLX (−2420); chr1:221053210-221053255/HLX
(+490); chr1:221914974-221915018/DUSP10 (+520); chr1:223190806-223190867/TLR5 (+125787), DISP1 (+2
02406); chr1:223316608-223316633/TLR5 (+3); chr1:223936753-223936995/CAPN2 (+36755), TP53BP2 (+96
800); chr1:224180453-224180478/DEGS1 (−190444), TP53BP2 (−146792); chr1:224804296-224804395/CNIH3
(+167); chr1:224804687-224804846/CNIH3 (+588); chr1:224805116-224805197/CNIH3 (+978); chr1:22480575
2-224805848/DNAH14 (−311556), CNIH3 (+1621); chr1:225655018-225655149/LBR (−39269), ENAH (+185761);
chr1:225655506-225655609/LBR (−39743), ENAH (+185287); chr1:225665781-225665834/LBR (−49993), ENA
H (+175037); chr1:225840035-225840077/ENAH (+789); chr1:225997626-225997661/EPHX1 (−153); chr1:2259
98612-225998735/EPHX1 (+877); chr1:226075435-226075467/TMEM63A (−5031), LEFTY1 (+1395); chr1:2260
99205-226099220/LEFTY1 (−22367), PYCR2 (+12752); chr1:226111592-226111646/PYCR2 (+346); chr1:2261
87085-226187121/H3F3B (−63305), LEFTY2 (−58020); chr1:226271413-226271508/H3F3B (+21053), ACBD3
(+102962); chr1:226298171-226298214/H3F3B (+47785), ACBD3 (+76230); chr1:226374647-226374683/ACBD
3 (−242); chr1:226411224-226411246/MIXL1 (−148); chr1:226595775-226595812/PARP1 (+7); chr1:226613283-
226613329/C1orf95 (−123195), PARP1 (−17505); chr1:226737755-226737804/C1orf95 (+1279), ITPKB (+18909
6); chr1:226924830-226924900/ITPKB (+2011), C1orf95 (+188364); chr1:227506012-227506042/CDC42BPA
(−201); chr1:227729683-227729829/CDC42BPA (−223930), ZNF678 (−21464); chr1:227922601-227922654/SNAP
47 (−69); chr1:228135304-228135362/WNT9A (+343); chr1:228194411-228194570/WNT3A (−232); chr1:228247
134-228247144/ARF1 (−23222), WNT3A (+52416); chr1:228270821-228270849/ARF1 (+474); chr1:228345277-
228345323/IBA57 (−8129), GJC2 (+7885); chr1:228353402-228353495/IBA57 (+20); chr1:228401735-2284017
59/OBSCN (+5886), TRIM11 (+192770); chr1:228401885-228401938/OBSCN (+6051), TRIM11 (+192605); chr
1:228566079-228566109/TRIM11 (+28423), OBSCN (+170233); chr1:228566526-228566547/TRIM11 (+27980),
OBSCN (+170676); chr1:228633950-228633983/HIST3H3 (−20941), HIST3H2A (+11593); chr1:228645244-22
8645305/HIST3H2BB (−533), HIST3H2A (+285); chr1:228651902-228652206/RNF187 (−23014), HIST3H2BB
(+6246); chr1:228652453-228652508/RNF187 (−22587), HIST3H2BB (+6673); chr1:228784040-228784106/RHO
U (−86751), RNF187 (+109005); chr1:228786156-228786236/RHOU (−84628), RNF187 (+111128); chr1:229126
191-229126268/RAB4A (−280649), RHOU (+255406); chr1:229542953-229543220/C1orf96 (−64399), ACTA1
(+26756); chr1:229567277-229567369/C1orf96 (−88635), ACTA1 (+2520); chr1:229567993-229568157/C1orf96
(−89387), ACTA1 (+1768); chr1:229568704-229568780/C1orf96 (−90054), ACTA1 (+1101); chr1:230193557-2301
93667/GALNT2 (−9344), URB2 (+431631); chr1:230202562-230202575/GALNT2 (−387); chr1:230202913-23020
2921/GALNT2 (−39); chr1:230410149-230410215/PGBD5 (+103209), GALNT2 (+207226); chr1:231113961-231
114005/ARV1 (−840), TTC13 (+635); chr1:231114594-231114640/ARV1 (−206), TTC13 (+1); chr1:231175649-2
31175692/TRIM67 (−123003), ARV1 (+60848); chr1:231176765-231176816/TRIM67 (−121883), ARV1 (+61968);
chr1:231296606-231296658/TRIM67 (−2042); chr1:231296784-231296817/TRIM67 (−1873); chr1:231298708-2
31298924/TRIM67 (+142); chr1:231299252-231299325/TRIM67 (+615); chr1:231299459-231299478/TRIM67
(+795); chr1:232765537-232765595/NTPCR (−320804), SIPA1L2 (−114323); chr1:232941599-232941622/SIPA1
L2 (−290368), NTPCR (−144759); chr1:233749731-233749768/KCNK1 (0); chr1:234040614-234040673/SLC35F
3 (−35); chr1:234040974-234041148/SLC35F3 (+382); chr1:234041361-234041415/SLC35F3 (+709); chr1:2340
41659-234041794/C1orf31 (−467702), SLC35F3 (+1048); chr1:234614344-234614388/TARBP1 (+483); chr1:23
5039934-235040018/IRF2BP2 (−294705), TOMM20 (+252280); chr1:235105805-235105855/IRF2BP2 (−360559),
TOMM20 (+186426); chr1:235586844-235586983/TBCE (+56186), B3GALNT2 (+80867); chr1:236227744-23
6227769/NID1 (+724); chr1:236227921-236228021/NID1 (+510); chr1:236228624-236228705/NID1 (−184); chr1:
236558517-236558547/EDARADD (+852); chr1:236559207-236559256/LGALS8 (−127507), EDARADD (+1552);
chr1:236849506-236850197/ACTN2 (+82); chr1:236959272-236959305/MTR (+708); chr1:237205224-23720
5354/RYR2 (−413); chr1:237205634-237205671/RYR2 (−49); chr1:237205804-237206101/RYR2 (+251); chr1:23
7206340-237206508/RYR2 (+722); chr1:240160858-240160916/FMN2 (−94298), CHRM3 (+368514); chr1:2401
61086-240161122/FMN2 (−94081), CHRM3 (+368731); chr1:240256602-240256624/FMN2 (+1428), GREM2
(+518849); chr1:240256905-240257029/FMN2 (+1782), GREM2 (+518495); chr1:240775313-240775378/GREM2
(+116); chr1:242011232-242011273/EXO1 (−240); chr1:242688034-242688080/PLD5 (−59); chr1:242688244-2
42688277/PLD5 (−263); chr1:243053672-243053716/PLD5 (−365696), CEP170 (+365014); chr1:243417911-243
417953/SDCCAG8 (−1375), CEP170 (+776); chr1:243601336-243601428/SDCCAG8 (+182075), AKT3 (+40520
2); chr1:243646764-243646877/SDCCAG8 (+227514), AKT3 (+359763); chr1:244013192-244013265/ZNF238
(−201332), AKT3 (−6645); chr1:244081062-244081077/ZNF238 (−133491), AKT3 (−74486); chr1:244817035-2448
17069/FAM36A (−181587), C1orf101 (+192379); chr1:245850554-245850639/KIF26B (+532310), SMYD3 (+820
047); chr1:246670510-246670544/SMYD3 (+117); chr1:246952346-246952382/SCCPDH (+64986), AHCTF1
(+142362); chr1:247171181-247171251/ZNF695 (+179); chr1:247275683-247275715/ZNF669 (−8025), ZNF124
(+59619); chr1:247291034-247291106/ZNF669 (−23396), ZNF124 (+44248); chr1:247373691-247373744/VN1R
5 (−45656), ZNF124 (−38400); chr1:247496058-247496128/ZNF496 (−1048); chr1:247511391-247511461/NLRP
3 (−68032), ZNF496 (−16381); chr1:247802702-247802810/OR13G1 (+33587), OR2G3 (+33868); chr1:2480204
49-248020515/TRIM58 (−19); chr1:248020631-248020720/TRIM58 (+175); chr1:249120192-249120240/LOC64
6627 (−217065), ZNF672 (−12314); chr10:681263-681420/DIP2C (+54266), ZMYND11 (+455408); chr10:681634-
681694/DIP2C (+53944), ZMYND11 (+455730); chr10:735224-735245/DIP2C (+373); chr10:830780-830815/DI
P2C (−95190), LARP4B (+100904); chr10:836303-836405/DIP2C (−100746), LARP4B (+95348); chr10:850908-8
51006/DIP2C (−115349), LARP4B (+80745); chr10:1094975-1095030/IDI1 (+58); chr10:1454224-1454400/IDI1
(−359251), ADARB2 (+325358); chr10:1651298-1651359/IDI1 (−556268), ADARB2 (+128341); chr10:1774913-17
74954/IDI1 (−679873), ADARB2 (+4736); chr10:1779083-1779111/ADARB2 (+573); chr10:3138409-3138450/P
FKP (+28718), PITRM1 (+76603); chr10:3155277-3155318/PFKP (+45586), PITRM1 (+59735); chr10:3214909-
3214966/PITRM1 (+95); chr10:5648580-5648693/ASB13 (+59921), CALML3 (+81713); chr10:5726789-572681
8/ASB13 (−18246), GDI2 (+128708); chr10:6245042-6245101/PFKFB3 (+232); chr10:7449817-7449839/PRKC
Q (−827574), SFMBT2 (+3620); chr10:7450244-7450490/PRKCQ (−828113), SFMBT2 (+3081); chr10:7453657-
7453902/SFMBT2 (−332); chr10:7454613-7454628/SFMBT2 (−1173); chr10:7454813-7454891/SFMBT2 (−1404);
chr10:7645840-7645935/SFMBT2 (−192440), ITIH5 (+63073); chr10:7708857-7708954/ITIH5 (+55); chr10:7709
941-7710011/ITIH5 (−1015); chr10:8075945-8076053/GATA3 (−20668), TAF3 (+215326); chr10:8076177-80763
00/GATA3 (−20428), TAF3 (+215566); chr10:8079390-8079432/GATA3 (−17256), TAF3 (+218738); chr10:80903
78-8090424/GATA3 (−6266), TAF3 (+229728); chr10:8093238-8093283/GATA3 (−3406); chr10:8093464-809352
2/GATA3 (−3174); chr10:8093825-8093859/GATA3 (−2825); chr10:8094258-8094327/GATA3 (−2374); chr10:809
5459-8095492/GATA3 (−1191); chr10:8097588-8098210/GATA3 (+1232); chr10:10840500-10840554/CELF2
(−219366); chr10:11207430-11207709/CELF2 (+147677), USP6NL (+366704); chr10:11207879-11207900/CELF
2 (+147997), USP6NL (+366384); chr10:11784232-11784285/ECHDC3 (−97); chr10:11784386-11784469/ECHD
C3 (+72); chr10:11784702-11784798/ECHDC3 (+394); chr10:12084984-12085023/UPF2 (−164); chr10:1304313
5-13043175/CCDC3 (+549); chr10:13142141-13142186/OPTN (+82); chr10:13701349-13701372/PRPF18 (+72
422), FRMD4A (+671505); chr10:13933134-13933246/PRPF18 (+304251), FRMD4A (+439676); chr10:139335
39-13933596/PRPF18 (+304629), FRMD4A (+439298); chr10:13933935-13933982/PRPF18 (+305020), FRMD
4A (+438907); chr10:13934126-13934168/PRPF18 (+305208), FRMD4A (+438719); chr10:15411721-15411790/
NMT2 (−201061), FAM171A1 (+1302); chr10:16562065-16562344/C1QL3 (+1799), PTER (+83238); chr10:165
62673-16562709/C1QL3 (+1313), PTER (+83724); chr10:16563665-16563690/C1QL3 (+326); chr10:16859907-
16859950/RSU1 (−476); chr10:17243725-17243744/TRDMT1 (+335); chr10:17271255-17271443/VIM (+1091),
ST8SIA6 (+224905); chr10:17495446-17495474/ST8SIA6 (+794); chr10:18429149-18429506/CACNB2 (−278);
chr10:18430151-18430183/CACNB2 (+561); chr10:21789415-21789424/NEBL (−602889), C10orf140 (+17331);
chr10:21822885-21823064/MLLT10 (−599); chr10:22540707-22540740/DNAJC1 (−248074), COMMD3-BMI1 (−6
4588); chr10:22542317-22542461/DNAJC1 (−249739), COMMD3-BMI1 (−62923); chr10:22624306-22624561/S
PAG6 (−9940), COMMD3-BMI1 (+19122); chr10:22625121-22625382/SPAG6 (−9122), COMMD3-BMI1 (+19940);
chr10:22625783-22625811/SPAG6 (−8577), COMMD3-BMI1 (+20485); chr10:22634244-22634309/SPAG6 (−9
7); chr10:22634655-22634820/SPAG6 (+364); chr10:22765792-22765820/SPAG6 (+131432), PIP4K2A (+2376
97); chr10:22766145-22766187/SPAG6 (+131792), PIP4K2A (+237337); chr10:23462463-23462485/PTF1A (−1
8986), MSRB2 (+78047); chr10:23462615-23462634/PTF1A (−18835), MSRB2 (+78198); chr10:23463074-2346
3266/PTF1A (−18290), MSRB2 (+78743); chr10:23463854-23463887/PTF1A (−17589), MSRB2 (+79444); chr10:
23480837-23480880/PTF1A (−601); chr10:23481155-23481296/PTF1A (−234); chr10:23482233-23482288/PTF
1A (+801); chr10:23488259-23488342/PTF1A (+6841); chr10:23632618-23632710/KIAA1217 (−865056), PTF1
A (+151204); chr10:23632941-23632977/KIAA1217 (−864761), PTF1A (+151499); chr10:23633507-23633573/K
IAA1217 (−864180), PTF1A (+152080); chr10:23983342-23983617/KIAA1217 (−514240), PTF1A (+502020); chr
10:23984775-23984841/KIAA1217 (−512912), PTF1A (+503348); chr10:25012963-25012980/ARHGAP21 (−375);
chr10:26223265-26223329/MYO3A (+295); chr10:26500871-26501026/GAD2 (−4287); chr10:26504144-26504
190/GAD2 (−1069); chr10:26504884-26505008/GAD2 (−290); chr10:26505236-26505441/GAD2 (+103); chr10:2
6505618-26505713/GAD2 (+430); chr10:26506619-26506902/APBB1IP (−220505), GAD2 (+1525); chr10:26680
734-26680792/APBB1IP (−46503), GAD2 (+175527); chr10:26727817-26727867/APBB1IP (+576); chr10:27389
391-27389428/ANKRD26 (+17); chr10:27528965-27528976/ACBD5 (+837); chr10:27529714-27529787/ACBD5
(+57); chr10:27531195-27531276/ACBD5 (−1428); chr10:27548332-27548400/ACBD5 (−18558), PTCHD3 (+15
4931); chr10:27608909-27608972/ACBD5 (−79133), PTCHD3 (+94356); chr10:27609162-27609225/ACBD5 (−7
9386), PTCHD3 (+94103); chr10:28034187-28034326/MKX (+521); chr10:28034615-28034756/MKX (+92); chr
10:28287318-28287365/ARMC4 (+635); chr10:28591417-28591456/WAC (−230984), MPP7 (−20370); chr10:28
822687-28822703/WAC (+274); chr10:28822932-28822977/WAC (+534); chr10:28957995-28958043/BAMBI
(−8405), WAC (+135598); chr10:30024657-30024793/SVIL (−100824), MTPAP (+613542); chr10:30316932-30316
987/SVIL (−393059), MTPAP (+321307); chr10:30347783-30347861/SVIL (−423921), MTPAP (+290445); chr10:
30722902-30722934/MAP3K8 (−32); chr10:30996298-30996387/AK302694 (+15140), ZNF438 (+324523); chr1
0:31607868-31607924/ZEB1 (−205); chr10:32049241-32049296/ARHGAP12 (+168501), ZEB1 (+441168); chr1
0:35896911-35896969/GJD4 (+2602), FZD8 (+33422); chr10:35928449-35928530/FZD8 (+1872), GJD4 (+3415
2); chr10:35928871-35929022/FZD8 (+1415), GJD4 (+34609); chr10:38299502-38299539/ZNF33A (−57); chr10:
38383694-38383837/ZNF37A (+502); chr10:38692070-38692155/HSD17B7P2 (+46805); chr10:42673383-4267
3405/ZNF33B (+460598); chr10:42971158-42971325/ZNF33B (+162750); chr10:42971459-42971517/ZNF33B
(+162504); chr10:43048231-43048268/ZNF33B (+85742); chr10:43048649-43048677/ZNF33B (+85329); chr10:
43250119-43250136/ZNF33B (−116136), BMS1 (−27826); chr10:43250780-43250854/ZNF33B (−116825), BMS1
(−27137); chr10:43278289-43278341/BMS1 (+361); chr10:43332632-43332713/RET (−239844), BMS1 (+54719);
chr10:43393643-43393982/RET (−178704), BMS1 (+115859); chr10:43428577-43428636/RET (−143910), BM
S1 (+150653); chr10:43428977-43429066/RET (−143495), BMS1 (+151068); chr10:43429197-43429215/RET
(−143311), BMS1 (+151252); chr10:43600447-43600505/CSGALNACT2 (−33458), RET (+27959); chr10:4369808
7-43698114/CSGALNACT2 (+64167), RASGEF1A (+64266); chr10:43818536-43818591/RASGEF1A (−56197),
FXYD4 (−48528); chr10:43903616-43903672/HNRNPF (−345); chr10:43904037-43904164/HNRNPF (−802); chr1
0:43932148-43932188/ZNF487P (−406); chr10:44162008-44162100/ZNF32 (−17728), HNRNPA3P1 (+123811);
chr10:44163001-44163135/ZNF32 (−18742), HNRNPA3P1 (+122797); chr10:44185015-44185089/ZNF32 (−407
26), HNRNPA3P1 (+100813); chr10:44500617-44500692/HNRNPA3P1 (−214790), CXCL12 (+379890); chr10:4
4788811-44788848/HNRNPA3P1 (−502965), CXCL12 (+91715); chr10:44789047-44789105/HNRNPA3P1 (−503
211), CXCL12 (+91469); chr10:44880455-44880519/CXCL12 (+58); chr10:44880645-44880673/CXCL12 (−114);
chr10:45914965-45915097/ALOX5 (+45402), MARCH8 (+115788); chr10:46222738-46222757/FAM21C (+100);
chr10:46970241-46970375/SYT15 (+293); chr10:46970484-46970604/SYT15 (+57); chr10:46971016-469711
50/SYT15 (−482); chr10:47083378-47083518/PPYR1 (−86); chr10:48377818-48377873/RBP3 (+13145), ZNF48
8 (+22757); chr10:48438779-48438805/GDF10 (+346); chr10:49732088-49732155/ARHGAP22 (+81016), MAP
K8 (+122467); chr10:49892860-49892942/WDFY4 (−617); chr10:50323687-50323824/VSTM4 (−197); chr10:508
17873-50818152/CHAT (−4070), SLC18A3 (−334); chr10:50818632-50818986/CHAT (−3274), SLC18A3 (+462);
chr10:50819408-50819747/CHAT (−2505); chr10:50887754-50887789/CHAT (+65689), OGDHL (+82653); chr1
0:50976615-50977033/OGDHL (−6399), AGAP8 (+269711); chr10:51489157-51489187/AGAP7 (−2845); chr10:
51784604-51784643/FAM21A (−43060), AGAP6 (+36546); chr10:51827748-51827794/FAM21A (+87); chr10:52
177879-52177951/ASAH2 (−169545), SGMS1 (+205822); chr10:53459262-53459294/CSTF2T (+77); chr10:600
26257-60026303/CISD1 (−2615), IPMK (+1414); chr10:60027022-60027085/CISD1 (−1841), IPMK (+640); chr10:
60145595-60145665/TFAM (+454); chr10:60272834-60272895/BICC1 (−39); chr10:60273279-60273346/BICC1
(+409); chr10:60936770-60936950/PHYHIPL (+512); chr10:62492030-62492156/ANK3 (−342459), CDK1 (−461
19); chr10:63422670-63422824/ARID5B (−238266), TMEM26 (−209539); chr10:64575068-64575127/EGR2 (+10
28), ADO (+10582); chr10:64578629-64578651/EGR2 (−2514); chr10:65281121-65281155/REEP3 (+15); chr10:
65801470-65801523/REEP3 (+520374); chr10:69645049-69645081/SIRT1 (+638); chr10:70091423-70091480/
HNRNPH3 (−316); chr10:70231552-70231629/DNA2 (+288); chr10:71329002-71329076/NEUROG3 (+4171), T
SPAN15 (+117813); chr10:71331905-71331949/NEUROG3 (+1283), TSPAN15 (+120701); chr10:71337713-71
337726/NEUROG3 (−4510); chr10:71562837-71562857/H2AFY2 (−249510), COL13A1 (+1203); chr10:7157748
7-71577569/H2AFY2 (−234829), COL13A1 (+15884); chr10:71596714-71596784/H2AFY2 (−215608), COL13A1
(+35105); chr10:71892101-71892126/AIFM2 (+576); chr10:71930093-71930114/SAR1A (+181); chr10:7193051
6-71930538/SAR1A (−242); chr10:72043453-72043778/NPFFR1 (−166); chr10:72200065-72200117/NODAL (+1
374), EIF4EBP2 (+36230); chr10:72200772-72200824/NODAL (+667); chr10:72201740-72201830/NODAL (−32
0); chr10:72218899-72218970/NODAL (−17470), PRF1 (+143596); chr10:72432630-72432660/ADAMTS14 (+86);
chr10:73156216-73156346/CDH23 (−410); chr10:73156868-73156912/CDH23 (+199); chr10:73490213-73490
263/C10orf105 (−10660), C10orf54 (+43099); chr10:73847807-73847817/SPOCK2 (+719); chr10:74057662-740
57707/DDIT4 (+24008), DNAJB12 (+57222); chr10:74079693-74079752/DNAJB12 (+35184), DDIT4 (+46046);
chr10:74385796-74385874/MICU1 (+114); chr10:74927622-74927672/ECD (+206); chr10:75255602-75255635/
PPP3CB (+163); chr10:75385578-75385619/USP54 (−50166), MYOZ1 (+15916); chr10:75407413-75407477/M
YOZ1 (−5930), SYNPO2L (+8387); chr10:75532518-75532564/FUT11 (+492); chr10:75633695-75633736/CAM
K2G (+633); chr10:76871155-76871196/DUSP13 (−2206), SAMD8 (−217); chr10:76993921-76993940/COMTD1
(+1839), VDAC2 (+24019); chr10:76994591-76994649/COMTD1 (+1150), VDAC2 (+24708); chr10:77155392-7
7155469/COMTD1 (−159661), ZNF503 (+6082); chr10:77155701-77155769/COMTD1 (−159965), ZNF503 (+577
8); chr10:77156017-77156165/COMTD1 (−160321), ZNF503 (+5422); chr10:77164970-77165030/ZNF503 (−348
7); chr10:77167346-77167438/ZNF503 (−5879); chr10:77167671-77167874/ZNF503 (−6260); chr10:79975649-7
9975697/ZMIZ1 (−853119), RPS24 (+182155); chr10:80853984-80854038/PPIF (−253209), ZMIZ1 (+25219); chr
10:81002067-81002167/PPIF (−105103), ZMIZ1 (+173325); chr10:81002329-81002562/PPIF (−104774), ZMIZ1
(+173654); chr10:81002925-81002985/PPIF (−104265), ZMIZ1 (+174163); chr10:81026274-81026379/PPIF (−80
893), ZMIZ1 (+197535); chr10:81053854-81053962/PPIF (−53312), ZMIZ1 (+225116); chr10:81163278-811633
37/ZCCHC24 (+40620), PPIF (+56088); chr10:81205737-81205809/ZCCHC24 (−1845), ZCCHC24 (−390); chr10:
81743127-81743191/FAM213A (−95267), SFTPD (−34298); chr10:81904148-81904219/PLAC9 (+11926), ANX
A11 (+61144); chr10:81964769-81964830/ANXA11 (+528); chr10:82116250-82116381/MAT1A (−66882), C10or
f58 (−57259); chr10:82214592-82214651/TSPAN14 (+584); chr10:83634362-83634466/NRG3 (−656); chr10:836
34759-83634796/NRG3 (−292); chr10:83635499-83635530/NRG3 (+445); chr10:83635633-83635670/NRG3
(+582); chr10:85997132-85997241/LRIT2 (−11903), LRIT1 (+4030); chr10:86300864-86300937/RGR (+296092); c
hr10:88122930-88122961/GRID1 (+3304); chr10:88123191-88123616/GRID1 (+2846); chr10:88124646-88124
762/GRID1 (+1546); chr10:88127203-88127270/GRID1 (−987); chr10:88161212-88161255/GRID1 (−34984), W
APAL (+120307); chr10:88281078-88281102/WAPAL (+451); chr10:88295629-88295680/OPN4 (−118659), WA
PAL (−14114); chr10:88296076-88296312/OPN4 (−118120), WAPAL (−14653); chr10:88296557-88296712/OPN
4 (−117679), WAPAL (−15094); chr10:88438958-88439022/BMPR1A (−77406), LDB3 (+10564); chr10:88515778-
88515848/BMPR1A (−583); chr10:88730582-88730629/AL157440 (−35), AGAP11 (+108); chr10:88731541-887
31612/AL157440 (−1006); chr10:88854483-88854570/GLUD1 (+249); chr10:89201423-89201524/GLUD1 (−346
698), MINPP1 (−62749); chr10:90750248-90750398/FAS (+35); chr10:91294013-91294097/SLC16A12 (+1258),
IFIT5 (+119730); chr10:91295492-91295584/SLC16A12 (−225); chr10:91295879-91295923/SLC16A12 (−588);
chr10:92616683-92616758/HTR7 (+950); chr10:92616995-92617016/HTR7 (+665); chr10:93668144-93668182/
FGFBP3 (+1095), TNKS2 (+110012); chr10:94448755-94448826/HHEX (−890); chr10:94448969-94449138/HH
EX (−627); chr10:94451646-94451695/EXOC6 (−156554), HHEX (+1990); chr10:94451826-94451973/EXOC6
(−156325), HHEX (+2219); chr10:94608199-94608294/EXOC6 (+22); chr10:94822415-94822849/CYP26A1 (−110
15), CYP26C1 (+1611); chr10:94823198-94823250/CYP26A1 (−10423), CYP26C1 (+2203); chr10:94825696-94
825982/CYP26A1 (−7808), CYP26C1 (+4818); chr10:94828125-94828193/CYP26A1 (−5488), CYP26C1 (+7138);
chr10:94831930-94831980/CYP26A1 (−1692); chr10:94835224-94835334/CYP26A1 (+1632), MYOF (+406795);
chr10:95008835-95008945/CYP26A1 (+175243), MYOF (+233184); chr10:95462353-95462392/FRA10AC1
(−44); chr10:98946067-98946094/SLIT1 (−398); chr10:98956267-98956313/SLIT1 (−10607), ARHGAP19 (+96140);
chr10:99080931-99080989/FRAT1 (+1938), FRAT2 (+13498); chr10:99178897-99178950/RRP12 (−17797), P
GAM1 (−7103); chr10:99392819-99392886/PI4K2A (−7590), C10orf62 (+43403); chr10:99789970-99790021/CR
TAC1 (+589); chr10:99790340-99790437/CRTAC1 (+196); chr10:99790760-99790917/CRTAC1 (−254); chr10:9
9798264-99798349/C10orf28 (−96074), CRTAC1 (−7722); chr10:100992191-100992221/HPS1 (−785502), HPSE
2 (+3426); chr10:100992647-100992681/HPS1 (−785960), HPSE2 (+2968); chr10:101089532-101089565/CNN
M1 (+693); chr10:101287510-101287571/GOT1 (−97011), NKX2-3 (−5149); chr10:101290161-101290179/NKX2-
3 (−2520); chr10:101291143-101291230/NKX2-3 (−1503); chr10:101296717-101296737/NKX2-3 (+4037), SLC2
5A28 (+83494); chr10:101989305-101989346/CHUK (+18); chr10:102027241-102027268/CWF19L1 (+182); chr
10:102132876-102132949/WNT8B (−89899), SCD (+26141); chr10:102322420-102322508/PAX2 (−183004), HI
F1AN (+26823); chr10:102414938-102415092/PAX2 (−90453), HIF1AN (+119374); chr10:102419267-10241939
9/PAX2 (−86135), HIF1AN (+123692); chr10:102470277-102470339/PAX2 (−35160), HIF1AN (+174667); chr10:
102473716-102473759/PAX2 (−31730), HIF1AN (+178097); chr10:102475471-102475538/PAX2 (−29963), HIF1
AN (+179864); chr10:102484246-102484269/PAX2 (−21210), HIF1AN (+188617); chr10:102489664-102489700/
PAX2 (−15786), HIF1AN (+194041); chr10:102497176-102497252/PAX2 (−8254), HIF1AN (+201573); chr10:10
2505849-102505873/PAX2 (+393); chr10:102507584-102507610/SEMA4G (−224689), PAX2 (+2129); chr10:10
2508290-102508341/SEMA4G (−223970), PAX2 (+2848); chr10:102589186-102589221/SEMA4G (−143082), P
AX2 (+83736); chr10:102833305-102833359/TLX1 (−57729), KAZALD1 (+12333); chr10:102881113-102881240/
TLX1 (−9884), KAZALD1 (+60178); chr10:102891956-102892090/TLX1 (+962); chr10:102892601-102892649/T
LX1 (+1564), LBX1 (+96092); chr10:102893952-102894090/TLX1 (+2960), LBX1 (+94696); chr10:102899856-1
02899948/TLX1 (+8841), LBX1 (+88815); chr10:102900159-102900201/TLX1 (+9119), LBX1 (+88537); chr10:1
02906470-102906524/TLX1 (+15436), LBX1 (+82220); chr10:102983057-102983087/LBX1 (+5645), TLX1 (+92
011); chr10:102983380-102983434/LBX1 (+5310), TLX1 (+92346); chr10:102984371-102984512/LBX1 (+4275),
TLX1 (+93381); chr10:102987020-102987127/LBX1 (+1643), TLX1 (+96013); chr10:102996481-102996596/B
TRC (−117286), LBX1 (−7822); chr10:102996827-102996899/BTRC (−116962), LBX1 (−8146); chr10:102997228-
102997281/BTRC (−116570), LBX1 (−8538); chr10:103043865-103043924/BTRC (−69930), LBX1 (−55178); chr1
0:103044228-103044300/BTRC (−69561), LBX1 (−55547); chr10:103070291-103070305/LBX1 (−81581), BTRC
(−43527); chr10:103454822-103454841/FBXW4 (−89); chr10:103534419-103534562/FBXW4 (−79748), FGF8 (+1
268); chr10:103535771-103535841/FGF8 (−47); chr10:103536257-103536299/FGF8 (−519); chr10:103543029-1
03543067/NPM3 (+122); chr10:103590537-103590543/MGEA5 (−12318), KCNIP2 (+13137); chr10:103601187-
103601231/MGEA5 (−22987), KCNIP2 (+2468); chr10:103603284-103603320/KCNIP2 (+375); chr10:10382510
1-103825150/HPS6 (+2); chr10:104000419-104000613/GBF1 (−4739), PITX3 (+715); chr10:104170263-104170
407/PSD (+8566), NFKB2 (+15996); chr10:104170801-104170870/PSD (+8065), NFKB2 (+16497); chr10:1041
74647-104174683/FBXL15 (−4906), PSD (+4236); chr10:104953006-104953067/NT5C2 (+26); chr10:10503665
9-105036700/INA (−240); chr10:105036883-105036893/INA (−32); chr10:105037892-105037955/INA (+1004), P
CGF6 (+72967); chr10:105244551-105244660/NEURL (−9129), CALHM3 (−5609); chr10:105253828-105253853/
NEURL (+106); chr10:105318861-105318973/NEURL (+65182), SH3PXD2A (+296247); chr10:105344252-105
344401/NEURL (+90592), SH3PXD2A (+270837); chr10:105344545-105344797/NEURL (+90936), SH3PXD2A
(+270493); chr10:105726496-105726544/SLK (−950); chr10:106097959-106098025/ITPRIP (−4329); chr10:1061
13446-106113480/SORCS3 (−287396), ITPRIP (−19800); chr10:106398688-106398825/SORCS3 (−2102); chr10:
106401029-106401111/SORCS3 (+211); chr10:106401302-106401321/SORCS3 (+453); chr10:106401433-10
6401510/SORCS3 (+613); chr10:106402191-106402271/SORCS3 (+1372); chr10:108923898-108923945/SOR
CS1 (+544); chr10:108924060-108924345/SORCS1 (+263); chr10:109674208-109674377/SORCS1 (−749827);
chr10:109674559-109674853/SORCS1 (−750240); chr10:110226169-110226435/NONE; chr10:110671884-110
671929/NONE; chr10:111216573-111216610/XPNPEP1 (+466719); chr10:111216804-111217161/XPNPEP1
(+466328); chr10:111971017-111971053/MXI1 (+3672), SMNDC1 (+93672); chr10:112257163-112257205/DUSP
5 (−441); chr10:112258656-112258702/SMC3 (−68770), DUSP5 (+1054); chr10:112838355-112838551/ADRA2
A (+1663); chr10:114206724-114206783/ZDHHC6 (−82), VTI1A (−2); chr10:114207016-114207054/ZDHHC6 (−3
63), VTI1A (+279); chr10:115439571-115439598/CASP7 (+159); chr10:115804562-115804635/ADRB1 (+793);
chr10:116853622-116853672/ATRNL1 (+523); chr10:118030706-118031061/GFRA1 (+2242); chr10:11803154
9-118031624/GFRA1 (+1539); chr10:118032230-118032412/GFRA1 (+805); chr10:118033994-118034142/GF
RA1 (−942); chr10:118368789-118368847/PNLIPRP2 (−11647), PNLIPRP1 (+18328); chr10:118369578-118369
604/PNLIPRP2 (−10874), PNLIPRP1 (+19101); chr10:118429552-118429771/PNLIPRP2 (+49197), HSPA12A
(+72423); chr10:118501942-118501983/HSPA12A (+122); chr10:118891134-118891179/KIAA1598 (−126069), V
AX1 (+6655); chr10:118891662-118891715/KIAA1598 (−126601), VAX1 (+6123); chr10:118892457-118892517/
KIAA1598 (−127399), VAX1 (+5325); chr10:118893581-118893679/KIAA1598 (−128542), VAX1 (+4182); chr10:
118893892-118894034/KIAA1598 (−128875), VAX1 (+3849); chr10:118894309-118894371/KIAA1598 (−129252),
VAX1 (+3472); chr10:118897419-118897478/VAX1 (+363); chr10:118899394-118899582/VAX1 (−1676); chr10:
118899790-118899879/VAX1 (−2023); chr10:118900245-118900323/VAX1 (−2472); chr10:118922924-1189229
43/KCNK18 (−34066), VAX1 (−25122); chr10:118927963-118927999/VAX1 (−30169), KCNK18 (−29019); chr10:1
18976401-118976444/SLC18A2 (−24161), KCNK18 (+19423); chr10:118976550-118976625/SLC18A2 (−23996),
KCNK18 (+19588); chr10:119000592-119000689/SLC18A2 (+57); chr10:119001155-119001328/SLC18A2 (+6
58); chr10:119292253-119292323/PDZD8 (−157351), EMX2 (−9668); chr10:119294898-119294908/PDZD8 (−15
9966), EMX2 (−7053); chr10:119295909-119295951/PDZD8 (−160993), EMX2 (−6026); chr10:119296431-11929
6524/PDZD8 (−161541), EMX2 (−5478); chr10:119296644-119296755/PDZD8 (−161763), EMX2 (−5256); chr10:1
19301428-119301759/EMX2 (−362); chr10:119302156-119302221/EMX2 (+233); chr10:119304479-119304501/
EMX2 (+2534), RAB11FIP2 (+501624); chr10:119304829-119304850/EMX2 (+2884), RAB11FIP2 (+501274); c
hr10:119306187-119306273/EMX2 (+4274), RAB11FIP2 (+499884); chr10:119310375-119310433/EMX2 (+844
8), RAB11FIP2 (+495710); chr10:119313504-119313528/EMX2 (+11560), RAB11FIP2 (+492598); chr10:11949
4597-119494848/EMX2 (+192767), RAB11FIP2 (+311391); chr10:120354330-120354368/PRLHR (+811); chr10:
120354736-120354843/PRLHR (+370); chr10:120355426-120355461/PRLHR (−284); chr10:120788981-12078
9021/NANOS1 (−227); chr10:120938355-120938396/PRDX3 (−31); chr10:121301184-121301363/RGS10 (+948);
chr10:121355815-121355859/TIAL1 (+704); chr10:121578082-121578116/MCMBP (+54295), INPP5F (+9254
0); chr10:121652425-121652472/SEC23IP (+364); chr10:121733837-121733935/PPAPDC1A (−482580), SEC2
3IP (+81801); chr10:121887594-121887641/PPAPDC1A (−328848), SEC23IP (+235533); chr10:122216757-122
216793/PPAPDC1A (+309); chr10:123688098-123688166/ATE1 (−586); chr10:123922683-123922724/PLEKHA
1 (−211390), TACC2 (+174015); chr10:123922862-123922903/PLEKHA1 (−211211), TACC2 (+174194); chr10:1
23923255-123923517/PLEKHA1 (−210708), TACC2 (+174697); chr10:123923796-123923880/PLEKHA1 (−2102
56), TACC2 (+175149); chr10:124060800-124060867/PLEKHA1 (−73260), TACC2 (+312145); chr10:124221065-
124221086/HTRA1 (+35); chr10:124638990-124639033/FAM24B (+145); chr10:124767931-124767994/ACAD
SB (−466), IKZF5 (+348); chr10:124893193-124893237/HMX3 (−2352); chr10:124895696-124895832/HMX3 (+1
97); chr10:124896712-124896744/HMX2 (−10910), HMX3 (+1161); chr10:124902047-124902138/HMX2 (−5545),
HMX3 (+6526); chr10:124902569-124902607/HMX2 (−5050), HMX3 (+7021); chr10:124905880-124905919/H
MX2 (−1738); chr10:124910455-124910708/BUB3 (−3178); chr10:125425612-125425689/GPR26 (−220); chr10:1
25425948-125426031/GPR26 (+119); chr10:125651167-125651293/CPXM2 (+270); chr10:125732479-125732
508/CPXM2 (−80994), CHST15 (+119436); chr10:125852498-125852540/CHST15 (−589); chr10:126135831-12
6135877/OAT (−28309), NKX1-2 (+2696); chr10:126222979-126222995/LHPP (+72646), FAM53B (+209943); c
hr10:126223218-126223244/LHPP (+72890), FAM53B (+209699); chr10:126329353-126329392/FAM53B (+10
3557), LHPP (+179032); chr10:126330564-126330614/FAM53B (+102341), LHPP (+180248); chr10:126398485-
126398628/FAM53B (+34373), LHPP (+248216); chr10:126480174-126480210/METTL10 (+247); chr10:12648
0360-126480377/METTL10 (+70); chr10:126605509-126605545/ZRANB1 (−25165), FAM175B (+115173); chr1
0:126606121-126606169/ZRANB1 (−24547), FAM175B (+115791); chr10:126840891-126840952/C10orf137 (−5
67162), CTBP2 (−124469); chr10:126847357-126847410/C10orf137 (−560700), CTBP2 (−130931); chr10:12684
7869-126847900/C10orf137 (−560199), CTBP2 (−131432); chr10:126850792-126850824/C10orf137 (−557276),
CTBP2 (−134355); chr10:127512510-127512531/UROS (−684), BCCIP (+417); chr10:128076863-128076940/A
DAM12 (+225); chr10:128077295-128077416/ADAM12 (−229); chr10:128993522-128993580/NPS (−354062), D
OCK1 (+399528); chr10:128994529-128994545/NPS (−353076), DOCK1 (+400514); chr10:129534586-1295349
92/FOXI2 (−749); chr10:129535447-129535695/FOXI2 (+33); chr10:129536224-129536258/FOXI2 (+703); chr1
0:129845665-129845735/MKI67 (+78768), PTPRE (+140375); chr10:129924518-129924546/MKI67 (−64); chr10:
130008877-130008906/MKI67 (−84424); chr10:130009288-130009346/MKI67 (−84849); chr10:130010133-1300
10211/MKI67 (−85704); chr10:130064059-130064183/MKI67 (−139653); chr10:130085276-130085355/MKI67
(−160848); chr10:130338552-130338585/MGMT (−926885), MKI67 (−414101); chr10:130338769-130338803/MG
MT (−926668), MKI67 (−414318); chr10:130508450-130508472/MGMT (−756993), MKI67 (−583993); chr10:1305
08595-130508634/MGMT (−756839), MKI67 (−584147); chr10:131502608-131502726/MGMT (+237213), EBF3
(+259424); chr10:131694768-131694792/EBF3 (+67311), MGMT (+429326); chr10:131757096-131757545/EBF
3 (+4770), MGMT (+491867); chr10:131757853-131758276/EBF3 (+4026), MGMT (+492611); chr10:13176341
6-131763611/EBF3 (−1423); chr10:131765744-131765970/EBF3 (−3766); chr10:131766125-131766190/EBF3
(−4067); chr10:131766321-131766558/EBF3 (−4349); chr10:131766757-131766862/EBF3 (−4719); chr10:131767
504-131767542/GLRX3 (−167116), EBF3 (−5432); chr10:131767676-131767751/GLRX3 (−166925), EBF3 (−562
3); chr10:131768028-131768057/GLRX3 (−166596), EBF3 (−5952); chr10:131771094-131771191/GLRX3 (−1634
96), EBF3 (−9052); chr10:131771302-131771415/GLRX3 (−163280), EBF3 (−9268); chr10:133109787-13310993
8/PPP2R2D (−638097); chr10:133110351-133110553/PPP2R2D (−637508); chr10:133110875-133110966/PPP2
R2D (−637039); chr10:133795242-133795312/BNIP3 (+158); chr10:133795884-133795975/BNIP3 (−495); chr10:
133796102-133796163/BNIP3 (−698); chr10:133850135-133850156/JAKMIP3 (−68167), BNIP3 (−54711); chr10:
133946714-133946772/DPYSL4 (−53671), JAKMIP3 (+28430); chr10:133999523-133999554/DPYSL4 (−875); c
hr10:133999687-133999776/DPYSL4 (−682); chr10:134000053-134000108/DPYSL4 (−333); chr10:134000426-1
34000529/DPYSL4 (+64); chr10:134000740-134000798/DPYSL4 (+355); chr10:134000948-134001139/DPYSL
4 (+630); chr10:134045869-134045912/DPYSL4 (+45477), STK32C (+75586); chr10:134110221-134110325/S
TK32C (+11204), DPYSL4 (+109859); chr10:134145271-134145293/INPP5A (−206071), STK32C (−23805); chr1
0:134234819-134234906/INPP5A (−116490), STK32C (−113386); chr10:134235679-134235720/INPP5A (−1156
53), STK32C (−114223); chr10:134358081-134358179/INPP5A (+6777), NKX6-2 (+241407); chr10:134388556-
134388646/INPP5A (+37248), NKX6-2 (+210936); chr10:134441735-134441808/INPP5A (+90419), NKX6-2 (+1
57765); chr10:134597647-134597971/NKX6-2 (+1728), INPP5A (+246456); chr10:134598125-134598164/NKX
6-2 (+1392), INPP5A (+246792); chr10:134598534-134598827/NKX6-2 (+856); chr10:134600017-134600037/N
KX6-2 (−490); chr10:134721478-134721649/NKX6-2 (−122027), TTC40 (+34525); chr10:134736329-134736443/
NKX6-2 (−136849), TTC40 (+19703); chr10:134755722-134755772/TTC40 (+342); chr10:134756383-13475640
2/TTC40 (−304); chr10:134827245-134827266/TTC40 (−71167), GPR123 (−57177); chr10:134843686-13484375
6/TTC40 (−87632), GPR123 (−40712); chr10:134902125-134902187/KNDC1 (−71815), GPR123 (+17723); chr10:
134936166-134936331/KNDC1 (−37722), GPR123 (+51816); chr10:134974272-134974307/KNDC1 (+319); chr
10:135040117-135040173/UTF1 (−3633); chr10:135043626-135043826/UTF1 (−52); chr10:135044391-1350445
54/UTF1 (+695); chr10:135071063-135071117/ADAM8 (+19317), VENTX (+19682); chr10:135092461-1350925
57/ADAM8 (−2102); chr10:135121663-135121725/ZNF511 (−729), TUBGCP2 (+950); chr10:135132162-135132
200/TUBGCP2 (−9537), CALY (+18294); chr10:135149222-135149265/TUBGCP2 (−26600), CALY (+1231); chr
10:135187009-135187027/ECHS1 (−110); chr10:135498960-135498995/DUX4L3 (+8699); chr11:207196-20723
2/RIC8A (−1316), BET1L (+208); chr11:208402-208468/BET1L (−1013), RIC8A (−95); chr11:279569-279619/AT
HL1 (−9544), NLRP6 (+1024); chr11:289112-289126/ATHL1 (−19); chr11:308166-308230/IFITM2 (+91); chr11:3
26834-326944/B4GALNT4 (−42906), IFITM3 (−5975); chr11:415429-415440/SIGIRR (+1962), PKP3 (+21218); c
hr11:416498-416565/SIGIRR (+865); chr11:503351-503443/RNH1 (+3424), PTDSS2 (+53117); chr11:535449-5
35466/HRAS (+92); chr11:560721-560737/RASSF7 (−721); chr11:576712-576759/PHRF1 (+253); chr11:615650-
615793/IRF7 (+277); chr11:626878-627094/CDHR5 (−1919), SCT (+187); chr11:627391-627433/CDHR5 (−234
5), SCT (−239); chr11:636947-637161/DRD4 (−251); chr11:637264-637349/DRD4 (+2); chr11:637601-637831/D
RD4 (+411); chr11:639574-639667/TMEM80 (−55995), DRD4 (+2316); chr11:640166-640245/TMEM80 (−55410),
DRD4 (+2901); chr11:694996-695035/TMEM80 (−600), DEAF1 (+724); chr11:720572-720696/TALDO1 (−2679
8), EPS8L2 (+14514); chr11:720892-720933/TALDO1 (−26519), EPS8L2 (+14793); chr11:721855-721951/TALD
O1 (−25529), EPS8L2 (+15783); chr11:722122-722134/TALDO1 (−25304), EPS8L2 (+16008); chr11:725638-725
812/TALDO1 (−21707), EPS8L2 (+19605); chr11:726035-726086/TALDO1 (−21371), EPS8L2 (+19941); chr11:7
47092-747122/TALDO1 (−325); chr11:787766-787883/PDDC1 (−10338), CEND1 (+2301); chr11:798453-798514/
SLC25A22 (−215); chr11:805428-805498/RPLP2 (−4473), PIDD (−213); chr11:809906-809954/PIDD (−4680), RP
LP2 (−6); chr11:829049-829095/CD151 (−3880); chr11:830244-830288/CD151 (−2686); chr11:830589-830701/C
D151 (−2307); chr11:911465-911511/CHID1 (−614); chr11:1241180-1241271/MUC5B (−3069); chr11:1319584-1
319647/TOLLIP (+11276), MUC5B (+75321); chr11:1330300-1330356/TOLLIP (+564); chr11:1330466-1330505/
TOLLIP (+406); chr11:1358566-1358609/BRSK2 (−52541), TOLLIP (−27696); chr11:1411534-1411549/BRSK2
(+413); chr11:1457141-1457207/MOB2 (+44941), BRSK2 (+46045); chr11:1470184-1470345/MOB2 (+31850), B
RSK2 (+59136); chr11:1577990-1578005/MOB2 (−70050), DUSP8 (+15152); chr11:1769585-1769644/IFITM10
(+2209), KRTAP5-6 (+51190); chr11:1769864-1770262/IFITM10 (+1761), KRTAP5-6 (+51638); chr11:1779778-
1779926/IFITM10 (−8028), CTSD (+5370); chr11:1780073-1780166/IFITM10 (−8296), CTSD (+5102); chr11:185
9277-1859348/TNNI2 (−2119); chr11:1874265-1874441/LSP1 (−12042), TNNI2 (+12921); chr11:1910501-19107
88/TNNT3 (−30154), LSP1 (+24250); chr11:2121673-2121752/IGF2 (+40628), MRPL23 (+153211); chr11:21594
26-2159472/IGF2 (+2892), MRPL23 (+190947); chr11:2161694-2161724/IGF2 (+632); chr11:2162113-2162141/
IGF2 (+214); chr11:2162482-2162544/IGF2 (−172); chr11:2165215-2165258/IGF2 (−2896); chr11:2165651-216
5670/IGF2 (−3320); chr11:2291018-2291072/TH (−98010), ASCL2 (+1137); chr11:2291925-2291944/ASCL2 (+2
47); chr11:2292058-2292105/ASCL2 (+100); chr11:2292360-2292391/ASCL2 (−194); chr11:2399323-2399399/
CD81 (+814); chr11:2465448-2465461/KCNQ1 (−766); chr11:2466176-2466191/KCNQ1 (−37); chr11:2469053-2
469137/KCNQ1 (+2874), CDKN1C (+437900); chr11:2488692-2488846/KCNQ1 (+22548), CDKN1C (+418226);
chr11:2801638-2801667/CDKN1C (+105342), KCNQ1 (+335432); chr11:2803036-2803087/CDKN1C (+103933),
KCNQ1 (+336841); chr11:2812959-2813023/CDKN1C (+94004), KCNQ1 (+346770); chr11:2813194-2813247/
CDKN1C (+93774), KCNQ1 (+347000); chr11:2859573-2859581/CDKN1C (+47418), KCNQ1 (+393356); chr11:
2859783-2859898/CDKN1C (+47154), KCNQ1 (+393620); chr11:2884144-2884158/CDKN1C (+22844), KCNQ
1 (+417930); chr11:2891061-2891233/CDKN1C (+15848), KCNQ1 (+424926); chr11:2923650-2923698/SLC22
A18AS (+1501), SLC22A18 (+2723); chr11:2935498-2935531/SLC22A18AS (−10340), PHLDA2 (+15135); chr1
1:3148344-3148451/CARS (−69717), OSBPL5 (+38184); chr11:3150355-3150434/CARS (−71714), OSBPL5 (+3
6187); chr11:4116137-4116183/RRM1 (+236); chr11:4233393-4233448/RRM1 (+117497), OR52B4 (+156195);
chr11:6502385-6502438/FXC1 (−265), ARFIP2 (+297); chr11:6633503-6633548/TAF10 (−51); chr11:6676553-6
676627/DCHS1 (+484); chr11:6676968-6677036/DCHS1 (+72); chr11:6704160-6704215/MRPL17 (+444); chr1
1:7272929-7273066/SYT9 (−183); chr11:7273260-7273679/SYT9 (+289); chr117273899-7274075/SYT9 (+806);
chr11:8040564-8040581/TUB (−19607), EIF3F (+32128); chr11:8040776-8040960/TUB (−19312), EIF3F (+324
23); chr11:8102326-8102368/TUB (+42167), RIC3 (+88243); chr11:8290021-8290057/LMO1 (−4633); chr11:898
5909-8985976/TMEM9B (+46); chr11:9112586-9112639/SCUBE2 (+537); chr11:9685180-9685218/SWAP70
(−429); chr11:10315719-10315760/SBF2 (+14); chr11:10326448-10326499/ADM (−168); chr11:10472522-104725
57/AMPD3 (+316); chr11:10715174-10715216/CTR9 (−57616), MRVI1 (−41347); chr11:10879328-10879371/ZB
ED5 (+270); chr11:12246230-12246347/MICALCL (−62158), MICAL2 (+114151); chr11:12695496-12695572/TE
AD1 (−435); chr11:13032760-13032789/ARNTL (−266550), RASSF10 (+1805); chr11:14379771-14379827/RRA
S2 (+931); chr11:14379984-14380040/RRAS2 (+718); chr11:14521424-14521484/COPB1 (−39); chr11:1466594
9-14665995/PDE3B (+703); chr11:14926601-14926712/CYP2R1 (−12906), CALCA (+67175); chr11:14926945-
14926975/CYP2R1 (−13209), CALCA (+66872); chr11:14927226-14927337/CYP2R1 (−13531), CALCA (+66550);
chr11:14995163-14995208/CALCA (−1354); chr11:14995865-14995927/CALCA (−2064); chr11:15095203-150
95368/CALCB (+140); chr11:15962840-15962947/SOX6 (+461519), INSC (+828924); chr11:16632081-166320
99/SOX6 (−207677), C11orf58 (−128058); chr11:16632428-16632513/SOX6 (−208058), C11orf58 (−127677); chr
11:16760177-16760216/C11orf58 (+49); chr11:17099311-17099363/RPS13 (−117); chr11:17229380-17229437/
NUCB2 (−68877), PIK3C2A (−38056); chr11:17373571-17373642/B7H6 (+298); chr11:17497521-17497545/ABC
C8 (+916); chr11:17741268-17741528/MYOD1 (+288); chr11:17741890-17741952/MYOD1 (+811); chr11:1774
2484-17742518/KCNC1 (−14994), MYOD1 (+1391); chr11:17756972-17756993/KCNC1 (−512); chr11:17757341-
17757671/KCNC1 (+11); chr11:17758069-17758241/KCNC1 (+660); chr11:18034806-18034821/SERGEF (−17
7); chr11:18230753-18230802/MRGPRX4 (+36394), SAA2-SAA4 (+39443); chr11:18813543-18813609/PTPN5
(−187); chr11:19139102-19139147/ZDHHC13 (+433); chr11:19261980-19262049/E2F8 (+492); chr11:19263268-
19263323/E2F8 (−789); chr11:19264056-19264093/E2F8 (−1568); chr11:19367135-19367267/NAV2 (−367680),
E2F8 (−104694); chr11:19367977-19368011/NAV2 (−366887), E2F8 (−105487); chr11:20177843-20178093/DB
X1 (+3902), NAV2 (+443087); chr11:20181644-20181724/DBX1 (+186); chr11:20182234-20182258/DBX1 (−376);
chr11:20385718-20385788/HTATIP2 (+464); chr11:20617871-20617973/SLC6A5 (−3024); chr11:20618393-2
0618422/SLC6A5 (−2538); chr11:20618925-20619219/SLC6A5 (−1874); chr11:20622793-20623258/NELL1 (−68
091), SLC6A5 (+2080); chr11:20627061-20627348/NELL1 (−63912), SLC6A5 (+6259); chr11:20690878-206909
82/NELL1 (−187); chr11:20691086-20691121/NELL1 (−13); chr11:20691380-20691431/NELL1 (+289); chr11:20
691616-20691747/NELL1 (+565); chr11:22359418-22359485/SLC17A6 (−215); chr11:22454259-22454378/SLC
17A6 (+94652), FANCF (+193068); chr11:22646720-22646772/FANCF (+641); chr11:22850779-22850850/SVI
P (+567); chr11:24518454-24518529/LUZP2 (−24); chr11:24518646-24518677/LUZP2 (+146); chr11:27740208-
27740255/BDNF (−17632), KIF18A (+389514); chr11:30037752-30037883/KCNA4 (+759); chr11:30606161-306
06215/MPPED2 (−4147); chr11:30606755-30606795/MPPED2 (−4734); chr11:31818513-31818570/PAX6 (+209
67), ELP4 (+287245); chr11:31820361-31820460/PAX6 (+19098), ELP4 (+289114); chr11:31825755-31825832/
PAX6 (+13715), ELP4 (+294497); chr11:31826071-31826106/PAX6 (+13420), ELP4 (+294792); chr11:318263
04-31826408/PAX6 (+13153), ELP4 (+295059); chr11:31826733-31826839/PAX6 (+12723), ELP4 (+295489); c
hr11:31827520-31827597/PAX6 (+11950), ELP4 (+296262); chr11:31837513-31837541/PAX6 (+1982), ELP4
(+306230); chr11:31839946-31840041/PAX6 (−485); chr11:31840559-31840602/PAX6 (−1072); chr11:31840711-
31840768/PAX6 (−1231); chr11:31842089-31842174/PAX6 (−2623); chr11:31847302-31847370/RCN1 (−265141),
PAX6 (−7827); chr11:31847713-31847769/RCN1 (−264736), PAX6 (−8232); chr11:31847873-31847895/RCN1
(−264593), PAX6 (−8375); chr11:31848603-31848722/RCN1 (−263814), PAX6 (−9154); chr11:32008882-320090
00/PAX6 (−169432), RCN1 (−103536); chr11:32009127-32009269/PAX6 (−169689), RCN1 (−103279); chr11:323
54960-32354999/WT1 (+102101), RCN1 (+242503); chr11:32355364-32355482/WT1 (+101658), RCN1 (+2429
46); chr11:32448894-32449104/WT1 (+8082), RCN1 (+336522); chr11:32452337-32452424/WT1 (+4700), RCN
1 (+339904); chr11:32452596-32452623/WT1 (+4471), RCN1 (+340133); chr11:32453234-32453253/WT1 (+38
37), RCN1 (+340767); chr11:32454918-32455062/WT1 (+2091), RCN1 (+342513); chr11:32456446-32456758/
WT1 (+479); chr11:32457199-32457219/WT1 (−128); chr11:32459451-32459576/WT1 (−2433); chr11:32460362-
32460464/WT1 (−3332); chr11:32460586-32460659/WT1 (−3542); chr11:32460908-32460979/WT1 (−3863); chr
11:32461092-32461162/WT1 (−4046); chr11:32605267-32605306/EIF3M (−104); chr11:33721944-33721966/00
59 (+22318), C11orf41 (+158078); chr11:33722568-33722597/CD59 (+21690), C11orf41 (+158706); chr11:337
96476-33796530/FBXO3 (−432); chr11:35439822-35439896/SLC1A2 (+1246), CD44 (+279442); chr11:3544009
8-35440137/SLC1A2 (+987); chr11:35440375-35440469/SLC1A2 (+683); chr11:35440885-35440936/SLC1A2
(+194); chr11:40315421-40315465/LRRC4C (+221); chr11:43380430-43380483/TTC17 (+22); chr11:43569075-
43569128/HSD17B12 (−133041), TTC17 (+188667); chr11:43603037-43603076/HSD17B12 (−99086), TTC17
(+222622); chr11:43604146-43604240/HSD17B12 (−97950), TTC17 (+223758); chr11:43604880-43604980/HSD1
7B12 (−97213), TTC17 (+224495); chr11:43902111-43902161/ALKBH3 (−221); chr11:44324975-44325391/ALX
4 (+6533), EXT2 (+207436); chr11:44325770-44325886/ALX4 (+5888), EXT2 (+208081); chr11:44326350-4432
6515/ALX4 (+5283), EXT2 (+208686); chr11:44330609-44330877/ALX4 (+973); chr11:44331440-44331482/AL
X4 (+255); chr11:44333462-44333476/ALX4 (−1753); chr11:44337629-44337726/CD82 (−249463), ALX4 (−5962);
chr11:44337862-44337882/CD82 (−249269), ALX4 (−6156); chr11:44338058-44338086/CD82 (−249069), ALX
4 (−6356); chr11:45306995-45307046/SYT13 (+863); chr11:45377078-45377121/SYT13 (−69216), CHST1 (+31
0106); chr11:45686424-45686449/CHST1 (+769); chr11:45907494-45907521/MAPK8IP1 (+461); chr11:461411
71-46141229/PHF21A (+1785), GYLTL1B (+198004); chr11:46316833-46316895/DGKZ (−66281), CREB3L1
(+17636); chr11:46317356-46317407/DGKZ (−65763), CREB3L1 (+18154); chr11:46354566-46354603/DGKZ (−2
8560), CREB3L1 (+55357); chr11:46412240-46412276/CHRM4 (−4151); chr11:46414368-46414468/CHRM4 (−6
311), AMBRA1 (+198496); chr11:46615625-46615662/AMBRA1 (−2730); chr11:46722959-46723021/ARHGAP1
(−870), ZNF408 (+673); chr11:46848187-46848210/CKAP5 (+19660), F2 (+107456); chr11:46939498-4693952
6/LRP4 (+661); chr11:47197640-47197710/LRP4 (−257502), ARFGAP2 (+1001); chr11:47198877-47198934/AR
FGAP2 (−230); chr11:47207899-47207922/PACSIN3 (+99); chr11:47416419-47416534/SPI1 (−16350), SLC39A
13 (−13569); chr11:47429895-47429925/SLC39A13 (−136); chr11:47430274-47430322/SLC39A13 (+252); chr1
1:47574517-47574565/CELF1 (−63965), PTPMT1 (−12441); chr11:47609824-47609860/FAM180B (+1612), C1
QTNF4 (+6119); chr11:47788925-47788955/AGBL2 (−52012), NUP160 (+81117); chr11:49229665-49229730/F
OLH1 (+524); chr11:49230035-49230099/FOLH1 (+155); chr11:55640410-55640448/SPRYD5 (−10344), OR5D
16 (+34201); chr11:57103297-57103333/P2RX3 (−2526), SSRP1 (+36); chr11:57227222-57227249/RTN4RL2
(−1103); chr11:57244189-57244209/RTN4RL2 (+15860), SLC43A1 (+38159); chr11:57244437-57244461/RTN4R
L2 (+16110), SLC43A1 (+37909); chr11:57250545-57250757/RTN4RL2 (+22312), SLC43A1 (+31707); chr11:5
7283277-57283303/SLC43A1 (−932); chr11:57414622-57414662/YPEL4 (+2775), SERPING1 (+48937); chr11:5
8345196-58345264/LPXN (−1840), ZFP91 (−1357); chr11:58345757-58345802/LPXN (−2390), ZFP91 (−807); chr
11:58874089-58874208/FAM111B (−509); chr11:58874385-58874476/FAM111B (−227); chr11:58903530-58903
571/FAM111A (−8701), FAM111B (+28893); chr11:58940607-58940666/DTX4 (+825); chr11:60609731-606097
73/CCDC86 (+323); chr11:60718854-60718976/SLC15A3 (+342); chr11:60775048-60775226/CD5 (−94793), C
D6 (+36024); chr11:60779665-60779738/CD5 (−90228), CD6 (+40589); chr11:61063024-61063061/VWCE (−25
5); chr11:61276504-61276535/SYT7 (+71824), SDHAF2 (+78923); chr11:61277128-61277153/SYT7 (+71203),
SDHAF2 (+79544); chr11:61322826-61322921/SYT7 (+25470), SDHAF2 (+125277); chr11:61452161-6145225
6/C11orf9 (−67912), DAGLA (+4304); chr11:61509972-61510080/C11orf9 (−10095), DAGLA (+62121); chr11:61
544844-61544889/C11orf10 (+15218), C11orf9 (+24746); chr11:61582699-61582756/FADS1 (+1801), FEN1
(+22619); chr11:61685037-61685087/RAB3IL1 (−65); chr11:61722987-61723400/BEST1 (+5838), FTH1 (+11938);
chr11:61880060-61880122/FTH1 (−144959), INCENP (−11354); chr11:61891685-61891713/INCENP (+254); c
hr11:62212011-62212174/SCGB1A1 (+25586), AHNAK (+102239); chr11:62359505-62359564/TUT1 (−426); ch
r11:62368870-62368902/MTA2 (+426); chr11:62380155-62380206/ROM1 (−32), EML3 (+56); chr11:62433123-
62433206/METTL12 (+386), METTL12 (+386); chr11:62455529-62455590/UBXN1 (−9033), LRRN4CL (+1811);
chr11:62477028-62477103/BSCL2 (−1887); chr11:62494180-62494223/TTC9C (−1750), HNRNPUL2 (+655); chr
11:62521370-62521417/ZBTB3 (+262); chr11:62539040-62539068/TAF6L (+279); chr11:62554212-62554242/
TMEM179B (−647); chr11:62554566-62554597/TMEM179B (−292); chr11:62608916-62608984/WDR74 (−1322);
chr11:62693057-62693135/CHRM1 (−4084); chr11:62693511-62693633/CHRM1 (−4560); chr11:62694083-6269
4283/CHRM1 (−5171), SLC22A6 (+58312); chr11:62694517-62694555/CHRM1 (−5524), SLC22A6 (+57959); chr
11:62694689-62694722/CHRM1 (−5694), SLC22A6 (+57789); chr11:62695679-62695756/CHRM1 (−6706), SLC
22A6 (+56777); chr11:63535939-63535977/C11orf95 (+155); chr11:63637232-63637403/MARK2 (+30918), RC
OR2 (+46998); chr11:63741979-63742038/COX8A (−70); chr11:63766830-63766917/FLRT1 (−104488), OTUB1
(+13549); chr11:63767029-63767245/FLRT1 (−104225), OTUB1 (+13812); chr11:63767448-63767518/FLRT1
(−103879), OTUB1 (+14158); chr11:63767885-63767925/FLRT1 (−103457), OTUB1 (+14580); chr11:63768436-6
3768619/FLRT1 (−102834), OTUB1 (+15203); chr11:63775190-63775230/FLRT1 (−96152), OTUB1 (+21885); c
hr11:63775400-63775531/FLRT1 (−95896), OTUB1 (+22141); chr11:63827740-63827861/FLRT1 (−43561), OT
UB1 (+74476); chr11:63828105-63828189/FLRT1 (−43215), OTUB1 (+74822); chr11:63828882-63828957/FLR
T1 (−42442), OTUB1 (+75595); chr11:63913806-63913901/MACROD1 (+19731), FLRT1 (+42492); chr11:63933
131-63933186/MACROD1 (+426); chr11:63933789-63933827/MACROD1 (−223); chr11:63972858-63972948/F
ERMT3 (−1249); chr11:63974393-63974539/FERMT3 (+314); chr11:64002334-64002368/VEGFB (+295); chr11:
64018526-64018569/PPP1R14B (−4135), PLCB3 (−447); chr11:64018686-64018726/PPP1R14B (−4293), PLCB
3 (−289); chr11:64060111-64060160/C11orf20 (−6682), KCNK4 (+1343); chr11:64064621-64064662/C11orf20
(−2176); chr11:64068021-64068047/ESRRA (−5010), C11orf20 (+1216); chr11:64108101-64108286/CCDC88B
(+504); chr11:64410185-64410203/SLC22A12 (+51912), NRXN2 (+80466); chr11:64480331-64480379/NRXN2
(+10305), SLC22A12 (+122073); chr11:64490258-64490299/NRXN2 (+381); chr11:64490807-64490825/NRXN2
(−156); chr11:64512180-64512196/RASGRP2 (+141); chr11:64577597-64577695/MEN1 (+542); chr11:6461878
1-64618887/CDC42BPG (−6793), EHD1 (+27357); chr11:64655726-64655823/EHD1 (−9584), ATG2A (+28947);
chr11:64660890-64660995/EHD1 (−14752), ATG2A (+23779); chr11:64815215-64815241/SAC3D1 (+6852), NA
ALADL1 (+10781); chr11:64851366-64851416/ZFPL1 (−303), CDCA5 (+224); chr11:64880411-64880471/BC10
4003 (−3434); chr11:65145929-65145991/SLC25A45 (+4182), TIGD3 (+23678); chr11:65313893-65314121/LTB
P3 (+11692), SCYL1 (+21459); chr11:65314382-65314432/LTBP3 (+11292), SCYL1 (+21859); chr11:65325124-
65325157/LTBP3 (+558); chr11:65339897-65339923/EHBP1L1 (−3599); chr11:65341515-65341594/EHBP1L1
(−1954); chr11:65408406-65408616/SIPA1 (+2933), RELA (+21932); chr11:65479379-65479399/KAT5 (−84); ch
r11:65585786-65585810/SNX32 (−15612), OVOL1 (+31293); chr11:65661532-65661563/CCDC85B (+3673), F
OSL1 (+6449); chr11:65769350-65769416/BANF1 (−167), EIF1AD (+254); chr11:65816520-65816560/SF3B2
(−3276), GAL3ST3 (+111); chr11:65838144-65838192/PACS1 (+344); chr11:66080699-66080764/CD248 (+3783),
TMEM151A (+21359); chr11:66103563-66103585/RIN1 (+426); chr11:66188485-66188570/NPAS4 (+53); chr
11:66188784-66188852/NPAS4 (+343); chr11:66206131-66206159/MRPL11 (+165); chr11:66313902-6631395
7/ACTN3 (−461), ZDHHC24 (−259); chr11:66327033-66327088/CTSF (+8986), ACTN3 (+12670); chr11:6640599
0-66406041/RBM14 (+21963), RBM4B (+39259); chr11:66624921-66624983/LRFN4 (+76); chr11:66791118-66
791246/SYT12 (+366); chr11:66824097-66824137/RHOD (−172); chr11:66839186-66839279/KDM2A (−47507),
RHOD (+14944); chr11:67034421-67034446/ADRBK1 (+529); chr11:67042267-67042318/SSH3 (−28626), ADR
BK1 (+8388); chr11:67070454-67070525/SSH3 (−429); chr11:67139461-67139534/POLD4 (−18446), CLCF1 (+2
150); chr11:67140120-67140146/POLD4 (−19081), CLCF1 (+1515); chr11:67140683-67140720/CLCF1 (+946);
chr11:67164664-67164734/PPP1CA (+4677), RAD9A (+5276); chr11:67171082-67171144/PPP1CA (−1737), TB
C1D10C (−299); chr11:67176853-67177119/CARNS1 (−6163), TBC1D10C (+5574); chr11:67232402-67232464/
TMEM134 (+4298), CABP4 (+9615); chr11:67250459-67250527/AIP (−12); chr11:67414419-67414476/1TBX10
(−7417), ACY3 (+3682); chr11:67479283-67479341/ALDH3B2 (−30627), UNC93B1 (+292281); chr11:67723262-6
7723287/ALDH3B2 (−274590), UNC93B1 (+48318); chr11:67770815-67770864/UNC93B1 (+753); chr11:67913
681-67913821/CHKA (−24893), SUV420H1 (+67033); chr11:67980996-67981026/SUV420H1 (−227); chr11:680
49737-68049808/LRP5 (−30335), C11orf24 (−10304); chr11:68079704-68079753/LRP5 (−379); chr11:68080705-
68080734/LRP5 (+612); chr11:68141702-68141741/PPP6R3 (−86464), LRP5 (+61614); chr11:68502784-68502
899/MTL5 (+16146), GAL (+50859); chr11:68596663-68596777/MTL5 (−77732), CPT1A (+12679); chr11:68611
560-68611600/CPT1A (−2181); chr11:68611729-68611752/CPT1A (−2342); chr11:68671146-68671203/IGHMB
P2 (−144), MRPL21 (+128); chr11:68847883-68848039/CCND1 (−607912), TPCN2 (+31611); chr11:69080670-6
9080724/CCND1 (−375176), TPCN2 (+264347); chr11:69189420-69189539/CCND1 (−266393), TPCN2 (+37313
0); chr11:69451377-69451404/CCND1 (−4482); chr11:69541215-69541289/FGF19 (−22146), FGF4 (+48919); c
hr11:69632196-69632221/FGF4 (−42038), FGF3 (+1983); chr11:69633741-69633750/FGF3 (+446); chr11:6963
4490-69634535/FGF3 (−321); chr11:69683377-69683413/ANO1 (−241013), FGF3 (−49203); chr11:69830518-69
830624/FGF3 (−196379), ANO1 (−93837); chr11:69832191-69832231/FGF3 (−198019), ANO1 (−92197); chr11:6
9920053-69920113/ANO1 (−4325); chr11:70117428-70117464/PPFIA1 (+640); chr11:70256925-70257034/CTT
N (+12368), SHANK2 (+678862); chr11:70270228-70270264/CTTN (+25634), SHANK2 (+665596); chr11:7027
8185-70278250/CTTN (+33606), SHANK2 (+657624); chr11:70374809-70374852/CTTN (+130219), SHANK2
(+561011); chr11:70413082-70413190/CTTN (+168524), SHANK2 (+522706); chr11:70508058-70508179/CTTN
(+263507), SHANK2 (+427723); chr11:70735555-70735623/SHANK2 (+200253), CTTN (+490977); chr11:7096
1699-70961871/SHANK2 (−25943), DHCR7 (+197692); chr11:71159389-71159453/NADSYN1 (−4796), DHCR7
(+56); chr11:71318810-71318952/DEFB108B (−225365), KRTAP5-11 (−24960); chr11:71497528-71497580/KRT
AP5-11 (−203633), DEFB108B (−46692); chr11:71524539-71524581/KRTAP5-11 (−230639), DEFB108B (−19686);
chr11:71951375-71951406/PHOX2A (+3829), INPPL1 (+15509); chr11:71952417-71952458/PHOX2A (+2782),
INPPL1 (+16556); chr11:71954824-71955006/PHOX2A (+305); chr11:71955125-71955189/PHOX2A (+63); c
hr11:71955519-71955549/PHOX2A (−314); chr11:72295437-72295544/CLPB (−149923), PDE2A (+90006); chr1
1:72301583-72301704/CLPB (−156076), PDE2A (+83853); chr11:72525873-72525937/ATG16L2 (+454); chr11:
72536189-72536283/ATG16L2 (+10785), FCHSD2 (+316907); chr1172975427-72975490/P2RY6 (−7788), P2R
Y2 (+46115); chr11:73471760-73471818/RAB6A (+412); chr11:73471971-73472038/RAB6A (+196); chr11:736
68838-73668924/DNAJB13 (+7517), UCP2 (+25008); chr11:73881799-73881871/PPME1 (−533), C2CD3 (+229);
chr11:74178406-74178470/KCNE3 (+162); chr11:74204140-74204173/MGC12965 (−328), LIPT2 (+598); chr1
1:74303493-74303538/POLD3 (−113); chr11:74442643-74442705/CHRDL2 (−488); chr11:74952930-74952948/
SLCO2B1 (+90907), ARRB1 (+109936); chr11:74953337-74953489/SLCO2B1 (+91381), ARRB1 (+109462); ch
r11:75095656-75095705/ARRB1 (−32806), RPS3 (−14881); chr11:75110549-75110581/RPS3 (+3); chr11:75140
878-75140939/RPS3 (+30347), GDPD5 (+95690); chr11:75236234-75236270/GDPD5 (+347); chr11:75294622-
75294662/SERPINH1 (+21541), MAP6 (+84837); chr11:75295538-75295594/SERPINH1 (+22465), MAP6 (+83
913); chr11:75379249-75379282/MAP6 (+213); chr11:75946679-75946766/WNT11 (−29149), PRKRIR (+14515
7); chr11:75947182-75947207/WNT11 (−29621), PRKRIR (+144685); chr11:76033291-76033342/WNT11 (−115
743), PRKRIR (+58563); chr11:76750933-76751048/CAPN5 (−27001), B3GNT6 (+5556); chr11:79152475-7915
2508/ODZ4 (−797); chr11:82443569-82443651/PRCP (+167947); chr11:82611623-82611666/C11orf82 (−1092),
PRCP (−88); chr11:82782250-82782314/RAB30 (+602); chr11:82996865-82996920/CCDC90B (+484); chr11:82
997285-82997368/CCDC90B (+50); chr11:86085862-86085931/C11orf73 (+72644), ME3 (+297343); chr11:879
08819-87908907/RAB38 (−228); chr11:88241976-88242130/CTSC (−171112), GRM5 (+539187); chr11:8824227
5-88242358/CTSC (−171376), GRM5 (+538923); chr11:88242624-88242705/CTSC (−171724), GRM5 (+538575);
chr11:88796788-88796810/TYR (−114241), GRM5 (−15559); chr11:88798931-88798965/TYR (−112092), GRM
5 (−17708); chr11:89224663-89224735/NOX4 (−46); chr11:89520697-89520729/TRIM49 (+21030), FOLH1B (+1
28248); chr11:89597088-89597136/LOC399940 (+11102), TRIM64B (+12073); chr11:89597496-89597571/LOC
399940 (+11524), TRIM64B (+11651); chr11:89597727-89597773/TRIM64B (+11435), LOC399940 (+11740); c
hr11:89785245-89785281/UBTFL1 (−33855), TRIM49L2 (+20989); chr11:89785646-89785710/UBTFL1 (−33440),
TRIM49L2 (+21404); chr11:91959327-91959354/FAT3 (−125921); chr11:92702848-92703034/MTNR1B (+152);
chr11:92930635-92930674/SLC36A4 (+440); chr11:93275775-93275864/C11orf75 (+726); chr11:93474620-9
3474649/C11orf54 (−158), TAF1D (+68); chr11:94134541-94134682/GPR83 (−27); chr11:94277098-94277135/F
UT4 (+100); chr11:94473769-94473802/AMOTL1 (−27722), PIWIL4 (+173312); chr11:94502058-94502100/AM
OTL1 (+571); chr11:94502552-94502757/AMOTL1 (+1147), CWC15 (+204121); chr11:94706511-94706543/KD
M4D (−318), CWC15 (+249); chr11:94706954-94706995/CWC15 (−199), KDM4D (+130); chr11:94771035-9477
1070/SRSF8 (−29003), KDM4DL (+12631); chr11:94883729-94883964/ENDOD1 (+60873), SESN3 (+80399); c
hr11:95070805-95070895/CEP57 (−452775), SESN3 (−106604); chr11:95522853-95522871/CEP57 (−763); chr1
1:95523950-95524001/CEP57 (+351); chr11:97616832-97616881/NONE; chr11:100999041-100999159/PGR
(+1444), TMEM133 (+136289); chr11:101453538-101453715/PGR (−453083), TRPC6 (+1032); chr11:10145409
3-101454170/TRPC6 (+527); chr11:101454362-101454496/TRPC6 (+230); chr11:105480787-105480858/GRIA
4 (+23); chr11:105948097-105948131/AASDHPPT (−178); chr11:106889317-106889400/GUCY1A2 (−188); chr1
1:107047948-107048033/GUCY1A2 (−158820), CWF19L2 (+280581); chr11:107328480-107328524/CWF19L2
(+70); chr11:107436098-107436157/ALKBH8 (+333); chr11:107436441-107436492/ALKBH8 (−6); chr11:108093
337-108093385/ATM (−198), NPAT (+4); chr11:109292830-109292891/C11orf87 (+15); chr11:109293764-1092
93873/C11orf87 (+973); chr11:109964620-109964697/ZC3H12C (+572); chr11:110301145-110301186/FDX1
(+505); chr11:110583029-110583043/ARHGAP20 (+415); chr11:111093701-111093794/ARHGAP20 (−510297), P
OU2AF1 (+156409); chr11:111169445-111169472/ARHGAP20 (−586008), POU2AF1 (+80698); chr11:1113075
06-111307554/POU2AF1 (−57373), BTG4 (+75549); chr11:111383532-111383557/BTG4 (−466); chr11:1114115
82-111411821/LAYN (+469); chr11:111749895-111749928/C11orf1 (−36), FDXACB1 (+269); chr11:111783479-
111783503/CRYAB (−1018), HSPB2 (+31); chr11:111847783-111847801/DIXDC1 (−241); chr11:111957072-111
957125/SDHD (−472), TIMM8B (+423); chr11:112832712-112832736/NCAM1 (+755); chr11:112834035-112834
116/TTC12 (−351175), NCAM1 (+2107); chr11:112834332-112834375/TTC12 (−350897), NCAM1 (+2385); chr1
1:113745967-113746039/USP28 (+253); chr11:113846911-113846936/ZBTB16 (−84364), HTR3A (+1127); chr1
1:113906881-113906924/ZBTB16 (−24385), HTR3A (+61106); chr11:113945421-113945435/NNMT (−221107),
ZBTB16 (+14140); chr11:114271473-114271531/RBM7 (+118); chr11:115501225-115501342/CADM1 (−126043);
chr11:115516380-115516438/CADM1 (−141168); chr11:115530096-115530221/CADM1 (−154918); chr11:115
531261-115531319/CADM1 (−156049); chr11:115630474-115630530/CADM1 (−255261); chr11:116033699-116
033793/CADM1 (−658505), ZNF259 (+624993); chr11:116371462-116371503/CADM1 (−996242), ZNF259 (+28
7256); chr11:116371851-116371911/CADM1 (−996640), ZNF259 (+286858); chr11:116451953-116452029/ZNF
259 (+206748); chr11:116658755-116658826/ZNF259 (−52); chr11:116662044-116662075/ZNF259 (−3321); chr
11:116968703-116968714/SIK3 (+284); chr11:117015348-117015390/PAFAH1B2 (+369); chr11:117102773-11
7102827/RNF214 (−604), PCSK7 (+11); chr11:117314711-117314745/CEP164 (+116157), DSCAML1 (+353248);
chr11:117666712-117666733/DSCAML1 (+1253), CEP164 (+468152); chr11:117694418-117694451/DSCAM
L1 (−26459), FXYD6-FXYD2 (+53311); chr11:118051251-118051352/SCN2B (−3965); chr11:118272061-118272
137/ATP5L (−5); chr11:118480274-118480317/ARCN1 (+37194), TREH (+70085); chr11:118481040-11848110
1/ARCN1 (+37969), TREH (+69310); chr11:118927811-118927867/HYOU1 (+86); chr11:118965117-11896517
8/H2AFX (+1029), HMBS (+9561); chr11:118972050-118972130/DPAGT1 (+695); chr11:118978008-11897803
1/C2CD2L (−73); chr11:119020623-119020671/ABCG4 (+897); chr11:119187226-119187246/MCAM (+604); ch
r11:119205423-119205436/RNF26 (+220); chr11:119234391-119234482/C1QTNF5 (−17054), USP2 (+17999);
chr11:119293320-119293352/THY1 (+910); chr11:119598945-119599011/PVRL1 (+457); chr11:119612268-11
9612323/PVRL1 (−12861), TRIM29 (+396567); chr11:119664280-119664443/PVRL1 (−64927), TRIM29 (+34450
1); chr11:120381284-120381335/GRIK4 (−149668), ARHGEF12 (+173692); chr11:120383016-120383054/GRIK
4 (−147943), ARHGEF12 (+175417); chr11:120434822-120434954/GRIK4 (−96090), ARHGEF12 (+227270); chr
11:121349766-121349930/SORL1 (+26936), BLID (+637075); chr11:122848313-122848368/BSX (+4038), CRT
AM (+139086); chr11:122850124-122850148/BSX (+2243), CRTAM (+140881); chr11:122855666-122855721/B
SX (−3315); chr11:122932232-122932297/HSPA8 (+636); chr11:123172863-123172915/GRAMD1B (−223639),
CLMP (−106882); chr11:123228716-123228788/GRAMD1B (−167776), CLMP (−162745); chr11:123229407-123
229461/GRAMD1B (−167094), CLMP (−163427); chr11:123301029-123301082/CLMP (−235049), GRAMD1B (−9
5472); chr11:123947079-123947220/OLFR959 (−81975), OR10G7 (−37442); chr11:124629419-124629499/VSI
G2 (−7350), ESAM (+2764); chr11:124630372-124630410/VSIG2 (−8282), ESAM (+1832); chr11:124664934-12
4665009/ROBO3 (−70333), ESAM (−32749); chr11:124709192-124709233/ESAM (−76990), ROBO3 (−26092); c
hr11:124735352-124735374/ROBO3 (+58); chr11:124747533-124747587/ROBO3 (+12255), ROBO4 (+20271);
chr11:124790854-124791118/HEPN1 (+1840), HEPACAM (+15322); chr11:124823983-124824011/CCDC15
(−20); chr11:125036337-125036497/PKNOX2 (+1858), FEZ1 (+329789); chr11:125495290-125495337/CHEK1
(−937); chr11:125774061-125774122/PUS3 (−976), DDX25 (−180); chr11:125774449-125774480/PUS3 (−1349), D
DX25 (+193); chr11:125932550-125932556/CDON (+634); chr11:126081180-126081235/RPUSD4 (+379); chr1
1:126081947-126082002/RPUSD4 (−388); chr11:126138825-126138866/FOXRED1 (−89), SRPR (+31); chr11:1
26226662-126226677/ST3GAL4 (+1130), KIRREL3 (+644096); chr11:126870501-126870524/KIRREL3 (+253);
chr11:128555224-128555316/ETS1 (−97817), FLI1 (−8541); chr11:128556481-128556532/ETS1 (−99054), FLI1
(−7304); chr11:128563186-128563336/FLI1 (−550); chr11:128564544-128564602/FLI1 (+762); chr11:128564877-
128564991/FLI1 (+1123), KCNJ1 (+147429); chr11:128694457-128694518/KCNJ1 (+17875), FLI1 (+130677); c
hr11:129149040-129149096/BARX2 (−96813), ARHGAP32 (−86975); chr11:129242617-129242675/BARX2 (−32
35); chr11:129243242-129243304/BARX2 (−2608); chr11:129244301-129244440/BARX2 (−1510); chr11:129765
331-129765437/NFRKB (−2480); chr11:129871720-129871764/PRDM10 (+988); chr11:129872116-129872136/
PRDM10 (+604); chr11:129940838-129940854/APLP2 (+383); chr11:131780331-131780535/NTM (−279); chr11:
131780777-131780834/NTM (+94); chr11:131781079-131781281/NTM (+468); chr11:131781587-131781648/
NTM (+906); chr11:132812632-132812674/OPCML (+384); chr11:132812990-132813045/OPCML (+19); chr11:
132813758-132813907/OPCML (−796); chr11:132953051-132953232/OPCML (−140105), SPATA19 (+762250);
chr11:133399768-133399856/OPCML (−586775), SPATA19 (+315580); chr11:133657711-133657734/OPCML
(−844686), SPATA19 (+57669); chr11:133826659-133826702/IGSF9B (+199); chr11:133994758-133994839/JA
M3 (+55979), NCAPD3 (+99627); chr11:134122881-134122924/ACAD8 (−531), THYN1 (+357); chr11:13414642
7-134146444/GLB1L3 (+161); chr11:134147413-134147458/GLB1L2 (−54332), GLB1L3 (+1161); chr11:134281
643-134281706/B3GAT1 (+137); chr11:134429596-134429681/B3GAT1 (−147827); chr12:312984-313001/SLC
6A12 (+10378), IQSEC3 (+136944); chr12:498867-498918/KDM5A (−273); chr12:662872-662960/B4GALNT3
(+93373), NINJ2 (+109839); chr12:861644-861677/WNK1 (−428); chr12:1756220-1756294/ADIPOR2 (−43990), W
NT5B (+17845); chr12:1771071-1771153/ADIPOR2 (−29135), WNT5B (+32700); chr12:1906436-1906476/LRT
M2 (−22977), ADIPOR2 (+106209); chr12:2030166-2030316/CACNA2D4 (−2371); chr12:2113390-2113432/DCP
1B (+266); chr12:2162054-2162067/CACNA1C (−355); chr12:2393190-2393284/FKBP4 (−510871), CACNA1C
(+230821); chr12:2734542-2734590/FKBP4 (−169542), CACNA1C (+572150); chr12:2798315-2798398/FKBP4
(−105751), CACNA1C (+635941); chr12:2800470-2800602/FKBP4 (−103572), CACNA1C (+638120); chr12:2800
908-2800937/FKBP4 (−103185), CACNA1C (+638507); chr12:2862143-2862267/FKBP4 (−41903), CACNA1C
(+699789); chr12:2903415-2903520/FKBP4 (−640); chr12:2905324-2905364/FKBP4 (+1236), NRIP2 (+38877); ch
r12:2986619-2986637/FOXM1 (−307), C12orf32 (+263); chr12:3068517-3068568/TEAD4 (+65); chr12:3123966-
3124000/TSPAN9 (−62538), TEAD4 (+55505); chr12:3239850-3239924/PRMT8 (−360538), TSPAN9 (+53366); c
hr12:3310076-3310150/PRMT8 (−290312), TSPAN9 (+123592); chr12:3600783-3600974/PRMT8 (+454); chr12:
3601342-3601377/PRMT8 (+935); chr12:3602717-3602864/PRMT8 (+2366), EFCAB4B (+259575); chr12:4273
886-4274001/PARP11 (−291336), CCND2 (−108958); chr12:4274420-4274474/PARP11 (−291839), CCND2 (−10
8455); chr12:4671347-4671496/DYRK4 (−27822), RAD51AP1 (+23472); chr12:4918683-4918713/KCNA6 (+356);
chr12:4919214-4919238/KCNA6 (+884); chr12:5019035-5019084/KCNA1 (−13); chr12:5019743-5019793/KC
NA1 (+695); chr12:5020314-5020440/KCNA5 (−132708), KCNA1 (+1304); chr12:5153287-5153357/KCNA5 (+2
37); chr12:5153461-5153656/KCNA5 (+474); chr12:6054168-6054231/ANO2 (+1198), NTF3 (+512920); chr12:
6054583-6054617/ANO2 (+798); chr12:6184466-6184515/ANO2 (−129093), VWF (+49345); chr12:6254615-625
4704/CD9 (−54822), VWF (−20824); chr12:6419566-6419603/PLEKHG6 (−17); chr12:6420169-6420228/PLEKH
G6 (+597); chr12:6427652-6427824/PLEKHG6 (+8136), TNFRSF1A (+23545); chr12:6446758-6446827/TNFRS
F1A (+4490), PLEKHG6 (+27191); chr12:6493449-6493504/LTBR (+120); chr12:6664346-6664370/IFFO1 (+89
1); chr12:6664615-6664702/IFFO1 (+590); chr12:6665276-6665329/IFFO1 (−54); chr12:6665438-6665528/IFFO
1 (−234); chr12:6677269-6677315/NOP2 (+188); chr12:6716398-6716434/CHD4 (+135); chr12:6756535-675664
0/ACRBP (−8); chr12:6772022-6772059/ING4 (+267); chr12:6797845-6797908/ZNF384 (+861); chr12:6875798-
6875827/PTMS (+272); chr12:6876078-6876101/PTMS (+549); chr12:6882912-6883010/CD4 (−15677), LAG3
(+1291); chr12:6883142-6883182/CD4 (−15476), LAG3 (+1492); chr12:7023681-7023730/ENO2 (+92); chr12:70
46237-7046406/PTPN6 (−9418), ATN1 (+12696); chr12:7055991-7056017/PTPN6 (+264); chr12:7061426-7061
574/PTPN6 (+5760), PHB2 (+18416); chr12:7068170-7068289/PHB2 (+11686), PTPN6 (+12490); chr12:71262
11-7126241/LPCAT3 (−384); chr12:7810819-7810948/CD163 (−154470), APOBEC1 (+7618); chr12:8025373-80
25634/AY455283 (−30), SLC2A14 (−9); chr12:8025755-8025860/SLC2A14 (−313), AY455283 (+274); chr12:8234
807-8234840/NECAP1 (+17); chr12:9067354-9067389/PHC1 (+56); chr12:9966761-9966895/CD69 (−53331), K
LRF1 (−13249); chr12:10826531-10826564/STYK1 (+343); chr12:11653464-11653509/ETV6 (−149301), PRB2
(−104989); chr12:11919406-11919510/BCL2L14 (−304420), ETV6 (+116670); chr12:12419920-12419964/LRP6
(−131); chr12:12715034-12715089/DUSP16 (+386); chr12:13069264-13069316/GPRC5A (+25334), GPRC5D
(+34028); chr12:14956430-14956469/WBP11 (−49); chr12:15942738-15942801/EPS8 (−260); chr12:20522232-20
522347/PDE3A (+111); chr12:21927839-21927877/KCNJ8 (−111); chr12:22094269-22094577/ABCC9 (−4795);
chr12:22095048-22095181/CMAS (−104044), ABCC9 (−5487); chr12:22199090-22199123/CMAS (−52); chr12:2
2486882-22487133/ST8SIA1 (+640); chr12:22488267-22488339/ST8SIA1 (−655); chr12:25055261-25055309/B
CAT1 (+724); chr12:25055633-25056242/BCAT1 (+71); chr12:25101998-25102009/LRMP (−103177), BCAT1
(−45995); chr12:25403771-25403796/KRAS (+70); chr12:26111601-26111628/RASSF8 (−349); chr12:26112281-2
6112305/RASSF8 (+329); chr12:26986068-26986098/ITPR2 (+48); chr12:26986920-26986998/ITPR2 (−828); c
hr12:27091135-27091184/FGFR1OP2 (−145), ASUN (+94); chr12:27091904-27091952/ASUN (−674), FGFR1O
P2 (+623); chr12:28127352-28127422/PTHLH (−2471); chr12:29301426-29301524/FAR2 (−75123), CCDC91
(+891340); chr12:29935410-29935454/OVCH1 (−284813), TMTC1 (+1311); chr12:29935839-29935902/TMTC1
(+872); chr12:29936323-29936395/TMTC1 (+384); chr12:29936516-29936542/TMTC1 (+214); chr12:29936643-2
9936661/TMTC1 (+91); chr12:29936832-29936976/TMTC1 (−161); chr12:29937402-29937496/TMTC1 (−706); c
hr12:30322925-30323014/TMTC1 (−386227), IPO8 (+525959); chr12:30323440-30323502/TMTC1 (−386728), I
PO8 (+525458); chr12:30353921-30353956/TMTC1 (−417196), IPO8 (+494990); chr12:30354459-30354599/TM
TC1 (−417786), IPO8 (+494400); chr12:30907149-30907225/CAPRIN2 (+261); chr12:30948977-30948988/TSP
AN11 (−130855), CAPRIN2 (−41535); chr12:30975325-30975388/TSPAN11 (−104481), CAPRIN2 (−67909); chr1
2:30975960-30976290/TSPAN11 (−103713), CAPRIN2 (−68677); chr12:31079368-31079417/TSPAN11 (−445); c
hr12:31079664-31079693/TSPAN11 (−159); chr12:31769423-31769475/METTL20 (−43160), DENND5B (−25497);
chr12:32259591-32259615/BICD1 (−582); chr12:33049624-33049652/PKP2 (+142); chr12:33592013-3359205
7/SYT10 (+719); chr12:33592254-33592284/SYT10 (+485); chr12:33593034-33593092/SYT10 (−309); chr12:34
175261-34175408/ALG10 (+119); chr12:34260841-34260905/ALG10 (+85657); chr12:38710536-38710582/AL
G10B (+2); chr12:39538628-39538688/KIF21A (+298534), ALG10B (+828101); chr12:39538939-39539283/KIF
21A (+298081), ALG10B (+828554); chr12:40501452-40501485/SLC2A13 (−1808); chr12:41086664-41086692/
CNTN1 (+320); chr12:41582207-41582398/PDZRN4 (+53); chr12:42538705-42538731/GXYLT1 (−45); chr12:42
631802-42631879/YAF2 (+313); chr12:42632091-42632177/YAF2 (+20); chr12:42982866-42982950/PRICKLE
1 (−105492), ADAMTS20 (+962816); chr12:43944881-43945109/ADAMTS20 (+729); chr12:43945380-4394541
6/ADAMTS20 (+326); chr12:43945781-43946202/ADAMTS20 (−268); chr12:45269387-45269416/NELL2 (+1231);
chr12:45444682-45444714/DBX2 (+184); chr12:46663633-46663671/SLC38A1 (−444); chr12:46777295-4677
7318/SLC38A2 (−10662), SLC38A4 (+442473); chr12:47224974-47225027/SLC38A4 (−5221), AMIGO2 (+24873
3); chr12:47225303-47225319/SLC38A4 (−5531), AMIGO2 (+248423); chr12:47225477-47225550/SLC38A4 (−5
734), AMIGO2 (+248220); chr12:47473849-47473886/AMIGO2 (−134); chr12:48099605-48099674/RPAP3 (+20
4); chr12:48099791-48099829/RPAP3 (+34); chr12:48134470-48134526/ENDOU (−15143), RAPGEF3 (+18391);
chr12:48213229-48213282/HDAC7 (+507); chr12:48214048-48214120/HDAC7 (−321); chr12:48336118-48336
156/VDR (−37323), TMEM106C (−21193); chr12:48357264-48357313/TMEM106C (−41); chr12:48592634-48592
685/OR10AD1 (+4415), C12orf68 (+15294); chr12:48690881-48690970/OR10AD1 (−93851), H1FNT (−31837); c
hr12:49110381-49110426/CCNT1 (+377); chr12:49211866-49211931/CACNB3 (+3684), DDX23 (+34058); chr1
2:49245891-49245939/DDX23 (+42); chr12:49319010-49319065/FKBP11 (+292); chr12:49350839-49350875/A
RF3 (+395); chr12:49350978-49351119/ARF3 (+203); chr12:49364238-49364415/ARF3 (−13075), WNT10B (+1
314); chr12:49375027-49375115/WNT1 (+2835), DDN (+18017); chr12:49390725-49390823/DDN (+2314), WN
T1 (+18538); chr12:49391105-49391146/DDN (+1962), WNT1 (+18890); chr12:49483554-49483609/RHEBL1
(−19807), DHH (+5020); chr12:49484861-49485104/RHEBL1 (−21208), DHH (+3619); chr12:49488071-49488131/
DHH (+501); chr12:49689097-49689134/PRPH (+207); chr12:49689392-49689466/PRPH (+520); chr12:497174
00-49717475/TROAP (+467); chr12:49726859-49727091/C1QL4 (+3996), TROAP (+10004); chr12:49731617-4
9731707/C1QL4 (−691); chr12:49735769-49735822/C1QL4 (−4825); chr12:49933259-49933289/KCNH3 (+334);
chr12:49942621-49942951/KCNH3 (+9846), MCRS1 (+17436); chr12:49943102-49943165/KCNH3 (+10194),
MCRS1 (+17088); chr12:50101536-50101574/FMNL3 (−358); chr12:50135042-50135166/TMBIM6 (−488); chr12:
50221947-50222003/BCDIN3D (+14937), TMBIM6 (+86383); chr12:50297911-50297952/FAIM2 (−172); chr12:
50349159-50349271/AQP5 (−6064), AQP2 (+4691); chr12:50350298-50350353/AQP5 (−4953); chr12:50505380-
50505542/C12orf62 (−439); chr12:50560393-50560468/CERS5 (+666); chr12:50560806-50560839/CERS5 (+2
74); chr12:51158245-51158271/ATF1 (+469); chr12:51663957-51663987/SMAGP (+230); chr12:51717594-517
17657/BIN2 (+312); chr12:51717855-51717946/BIN2 (+37); chr12:51718087-51718198/BIN2 (−205); chr12:519
85415-51985463/SCN8A (+419); chr12:52115423-52115652/FIGNL2 (+110163), SCN8A (+130518); chr12:522
07965-52208001/FIGNL2 (+17718), SCN8A (+222963); chr12:52214118-52214230/FIGNL2 (+11527), SCN8A
(+229154); chr12:52214427-52214507/FIGNL2 (+11234), SCN8A (+229447); chr12:52214702-52214925/FIGNL
2 (+10887), SCN8A (+229794); chr12:52262682-52262735/ACVRL1 (−43404), FIGNL2 (−37008); chr12:523008
41-52300859/FIGNL2 (−75149), ACVRL1 (−5263); chr12:52301386-52301494/ACVRL1 (−4673); chr12:52400489-
52400516/GRASP (−245); chr12:52401539-52401605/GRASP (+824); chr12:52430580-52430619/NR4A1 (−145
86), GRASP (+29852); chr12:52463301-52463367/C12orf44 (−424); chr12:52626747-52626830/KRT7 (−165); ch
r12:52627102-52627229/KRT7 (+212); chr12:52644187-52644231/AK300121 (+7962), KRT7 (+17255); chr12:5
2652251-52652360/AK300121 (−135); chr12:52652506-52652598/AK300121 (−381); chr12:52994989-52995004/
KRT72 (+325); chr12:52995142-52995207/KRT72 (+147); chr12:53273249-53273300/KRT78 (−30497), KRT8
(+25593); chr12:53359316-53359385/EIF4B (−40711), KRT18 (+16508); chr12:53440704-53440742/TENC1 (−31
12); chr12:53591688-53591720/CSAD (−17011), ITGB7 (+9296); chr12:53626155-53626251/RARG (−163); chr1
2:53718632-53718690/AAAS (−3249); chr12:53738593-53738648/SP1 (−35358), SP7 (−9084); chr12:53845682-
53845741/PCBP2 (−174); chr12:54070771-54070830/ATP5G2 (−692); chr12:54088831-54088951/ATP5G2 (−18
782), CALCOCO1 (+32416); chr12:54090594-54090662/ATP5G2 (−20519), CALCOCO1 (+30679); chr12:54142
073-54142109/HOXC13 (−190485), CALCOCO1 (−20784); chr12:54145858-54145880/HOXC13 (−186707), CAL
COCO1 (−24562); chr12:54329479-54329604/HOXC13 (−3034); chr12:54338818-54338885/HOXC12 (−9862), H
OXC13 (+6276); chr12:54343830-54343968/HOXC12 (−4815); chr12:54345659-54345891/HOXC12 (−2939); chr
12:54349080-54349255/HOXC12 (+454); chr12:54349635-54349715/HOXC12 (+961); chr12:54351325-543513
75/HOXC11 (−15560), HOXC12 (+2636); chr12:54354694-54354814/HOXC11 (−12156), HOXC12 (+6040); chr1
2:54355139-54355184/HOXC11 (−11748), HOXC12 (+6448); chr12:54355399-54355475/HOXC11 (−11473), HO
XC12 (+6723); chr12:54357568-54357603/HOXC11 (−9324), HOXC12 (+8872); chr12:54359683-54359742/HO
XC11 (−7197), HOXC12 (+10999); chr12:54367375-54367429/HOXC11 (+492); chr12:54377947-54377977/HO
XC10 (−984); chr12:54379931-54379958/HOXC10 (+999); chr12:54384665-54384762/HOXC9 (−9163), HOXC1
0 (+5768); chr12:54391324-54391399/HOXC9 (−2515); chr12:54393724-54393798/HOXC9 (−116); chr12:54394
419-54394466/HOXC9 (+566); chr12:54398786-54398888/HOXC8 (−4053); chr12:54409194-54409267/HOXC6
(−12963), HOXC8 (+6341); chr12:54412089-54412129/HOXC6 (−10085), HOXC8 (+9219); chr12:54422346-544
22376/HOXC5 (−4471), HOXC6 (+167); chr12:54423464-54423565/HOXC5 (−3317); chr12:54424749-54425031/
HOXC5 (−1942); chr12:54425141-54425221/HOXC5 (−1651); chr12:54427932-54427974/HOXC4 (−19708), HO
XC5 (+1121); chr12:54428394-54428574/HOXC4 (−19177), HOXC5 (+1652); chr12:54441288-54441391/HOXC
4 (−6321), HOXC5 (+14508); chr12:54441837-54441889/HOXC4 (−5798), HOXC5 (+15031); chr12:54447833-54
447898/HOXC4 (+205); chr12:54484258-54484310/HOXC4 (+36623), SMUG1 (+98494); chr12:54500665-5450
0739/HOXC4 (+53041), SMUG1 (+82076); chr12:54520194-54520221/SMUG1 (+62570), HOXC4 (+72547); chr
12:54552988-54553118/SMUG1 (+29725), HOXC4 (+105392); chr12:54762581-54762616/GPR84 (−4329); chr
12:54811841-54811879/ZNF385A (−26777), ITGA5 (+1190); chr12:56040105-56040133/METTL7B (−35211), O
R10P1 (+9443); chr12:56122228-56122269/CD63 (+661); chr12:56224611-56224653/DNAJC14 (−2134); chr12:
56473818-56473838/ERBB3 (+19); chr12:56473969-56473998/ERBB3 (+175); chr12:56660529-56660589/CO
Q10A (−83); chr12:56728124-56728191/IL23A (−4505), PAN2 (−625); chr12:56842998-56843042/TIMELESS (+1
80); chr12:56882568-56882583/GLS2 (−395); chr12:57081831-57081863/PTGES3 (+231); chr12:57472235-574
72277/TMEM194A (+318); chr12:57608272-57608337/NXPH4 (−2273); chr12:57618740-57619085/SHMT2 (−44
43); chr12:57824835-57824865/INHBC (−3693); chr12:58004614-58004657/ARHGEF25 (+673); chr12:5801311
8-58013189/SLC26A10 (−539); chr12:58013355-58013420/SLC26A10 (−305); chr12:58013538-58013611/SLC2
6A10 (−118); chr12:58014571-58014820/SLC26A10 (+1003), B4GALNT1 (+12289); chr12:58021459-58021707/
B4GALNT1 (+5402), SLC26A10 (+7890); chr12:58025734-58025869/B4GALNT1 (+1183), SLC26A10 (+12109);
chr12:58026009-58026065/B4GALNT1 (+948); chr12:58158712-58158778/CYP27B1 (+723); chr12:62585013-
62585030/FAM19A2 (+1598); chr12:63543646-63543753/PPM1H (−215035), AVPR1A (+2890); chr12:6354440
2-63544498/PPM1H (−215785), AVPR1A (+2140); chr12:63544600-63544728/PPM1H (−215999), AVPR1A (+19
26); chr12:64784081-64784107/XPOT (−14059), SRGAP1 (+545553); chr12:65003768-65003812/RASSF3 (−50
3); chr12:65218559-65218727/TBC1D30 (+291); chr12:65219528-65219605/TBC1D30 (+1215), WIF1 (+29577
9); chr12:65564653-65564722/MSRB3 (−108079), LEMD3 (+1337); chr12:65672090-65672173/MSRB3 (−635);
chr12:66122996-66123284/HMGA2 (−95100), MSRB3 (+450373); chr12:66275569-66275657/HMGA2 (+57373),
LLPH (+248920); chr12:66563504-66563563/TMBIM4 (+273); chr12:67463646-67463696/GRIP1 (−390746), C
AND1 (−199390); chr12:70759865-70759910/KCNMB4 (−174); chr12:70760367-70760384/KCNMB4 (+314); chr
12:72666295-72666330/TRHDE (−216); chr12:72666907-72666997/TRHDE (+423); chr12:75601231-75601378/
KCNC2 (+2206); chr12:75601500-75601695/KCNC2 (+1913); chr12:76424205-76424269/KRR1 (−518819), PHL
DA1 (+1319); chr12:76425040-76425082/PHLDA1 (+495); chr12:77157930-77157949/ZDHHC17 (+86); chr12:7
9258879-79258965/SYT1 (−180511); chr12:81101798-81101900/MYF6 (+441); chr12:81102034-81102135/MY
F6 (+677); chr12:81102456-81102512/MYF5 (−8224), MYF6 (+1076); chr12:81107932-81107996/MYF5 (−2744);
chr12:81471615-81471753/ACSS3 (−125); chr12:82153255-82153283/PPFIA2 (−160); chr12:82752104-827521
61/CCDC59 (+66); chr12:83080941-83080990/TMTC2 (+32); chr12:85306282-85306322/SLC6A15 (+304); chr1
2:85306573-85306789/SLC6A15 (−75); chr12:85672287-85672326/ALX1 (−1729); chr12:93835438-93835512/U
BE2N (+551); chr12:93967216-93967274/CRADD (−103906), SOCS2 (+1764); chr12:95267194-95267247/TMC
C3 (−222897), NDUFA12 (+130290); chr12:95267681-95267706/TMCC3 (−223370), NDUFA12 (+129817); chr1
2:95466966-95467037/NR2C1 (+402); chr12:95941795-95942135/USP44 (+655); chr12:95942270-95942346/U
SP44 (+312); chr12:95942723-95942748/USP44 (−116); chr12:96252489-96252568/SNRPF (−180); chr12:9658
7990-96588010/ELK3 (−207); chr12:97379957-97379992/NEDD1 (+78974); chr12:98909268-98909291/TMPO
(−71); chr12:99139472-99139525/APAF1 (+100421); chr12:99288408-99288621/APAF1 (+249437); chr12:99288
937-99288961/APAF1 (+249871); chr12:100536769-100536816/ANKS1B (−158361), ACTR6 (−57781); chr12:10
1109992-101110039/ANO4 (−78358), GAS2L3 (+142527); chr12:101110315-101110358/ANO4 (−78037), GAS2
L3 (+142848); chr12:102036189-102036308/CHPT1 (−55168), MYBPC1 (+47540); chr12:103344940-10334497
9/PAH (−33579), ASCL1 (−6492); chr12:103350304-103350383/ASCL1 (−1108); chr12:103351986-103352051/A
SCL1 (+567); chr12:103352155-103352170/ASCL1 (+711); chr12:103352283-103352313/ASCL1 (+846); chr12:
103696160-103696193/STAB2 (−284892), ASCL1 (+344725); chr12:103888478-103888614/STAB2 (−92523), A
SCL1 (+537094); chr12:103889714-103889788/STAB2 (−91318), ASCL1 (+538299); chr12:104234273-1042343
31/NT5DC3 (+673); chr12:104458416-104458472/HCFC2 (+208); chr12:104609878-104610162/TXNRD1 (+46
1); chr12:104850537-104850577/CHST11 (−135); chr12:105351786-105351818/SLC41A2 (−29330), ALDH1L2
(+126539); chr12:106976780-106976842/RFX4 (−18104), POLR3B (+225375); chr12:106979590-106979636/RF
X4 (−15302), POLR3B (+228177); chr12:106980747-106980911/RFX4 (−14086), POLR3B (+229393); chr12:107
297125-107297169/C12orf23 (−52397), RIC8B (+128748); chr12:108079467-108079515/PWP1 (−99); chr12:108
155006-108155044/PRDM4 (−111); chr12:108169414-108169549/WSCD2 (−354029), ASCL4 (+1320); chr12:10
8237525-108237660/WSCD2 (−285918), ASCL4 (+69431); chr12:108238514-108238683/WSCD2 (−284912), A
SCL4 (+70437); chr12:108239130-108239244/WSCD2 (−284324), ASCL4 (+71025); chr12:108239603-1082396
45/WSCD2 (−283887), ASCL4 (+71462); chr12:108258131-108258145/WSCD2 (−265373), ASCL4 (+89976); ch
r12:108955282-108955347/ISCU (−979), SART3 (−150); chr12:109124246-109124419/CORO1C (+962); chr12:1
09125003-109125126/CORO1C (+230); chr12:109162494-109162538/CORO1C (−37221), SSH1 (+88843); chr
12:109491027-109491071/USP30 (+669); chr12:110150197-110150260/TRPV4 (+120983), MVK (+138729); ch
r12:110156231-110156484/TRPV4 (+114854), MVK (+144858); chr12:110841286-110841330/ANAPC7 (+227);
chr12:110906112-110906153/GPN3 (+393); chr12:110939835-110939888/RAD9B (−143), VPS29 (+54); chr12:
111471960-111472058/CUX2 (+181); chr12:111472196-111472356/CUX2 (+448); chr12:111472672-11147285
1/CUX2 (+934); chr12:111847214-111847305/SH2B3 (+3508), ATXN2 (+190220); chr12:111866818-11186689
2/SH2B3 (+23103), ATXN2 (+170625); chr12:112035535-112035577/ATXN2 (+1924), SH2B3 (+191804); chr12:
112450361-112450381/ERP29 (−781), TMEM116 (+652); chr12:112820214-112820247/C12orf51 (−335); chr12:
113013279-113013320/RPH3A (−216249), PTPN11 (+156764); chr12:113494416-113494430/DTX1 (−1239); ch
r12:113508119-113508199/DTX1 (+12497), RASAL1 (+65400); chr12:113900678-113900752/LHX5 (+9162), S
DSL (+40499); chr12:113901159-113901407/LHX5 (+8594), SDSL (+41067); chr12:113902018-113902041/LH
X5 (+7847), SDSL (+41814); chr12:113906875-113906998/LHX5 (+2940), SDSL (+46721); chr12:113909315-1
13909328/LHX5 (+555); chr12:113909503-113909534/LHX5 (+358); chr12:113909657-113909717/LHX5 (+190);
chr12:113913682-113913883/LHX5 (−3906); chr12:113914224-113914300/LHX5 (−4385); chr12:113917517-1
13917580/LHX5 (−7672), RBM19 (+486627); chr12:113917701-113917730/LHX5 (−7839), RBM19 (+486460); c
hr12:114075876-114075909/LHX5 (−166016), RBM19 (+328283); chr12:114404064-114404100/RBM19 (+94);
chr12:114834173-114834208/RBM19 (−430015), TBX5 (+9698); chr12:114838312-114838368/RBM19 (−43416
4), TBX5 (+5549); chr12:114843187-114843260/TBX5 (+665); chr12:114846947-114847042/TBX5 (−3106); chr
12:114847437-114847577/TBX5 (−3618); chr12:114878594-114878808/TBX5 (−34812), TBX3 (+243268); chr12:
114885184-114885371/TBX5 (−41389), TBX3 (+236691); chr12:114886431-114886560/TBX5 (−42607), TBX3
(+235473); chr12:115102508-115102687/TBX5 (−258709), TBX3 (+19371); chr12:115103155-115103249/TBX5
(−259313), TBX3 (+18767); chr12:115103711-115103980/TBX5 (−259957), TBX3 (+18123); chr12:115105189-1
15105395/TBX5 (−261403), TBX3 (+16677); chr12:115109568-115109885/TBX5 (−265838), TBX3 (+12242); chr
12:115123170-115123418/TBX3 (−1325); chr12:115124972-115125106/TBX3 (−3070); chr12:115129956-11513
0053/TBX3 (−8036); chr12:115138087-115138274/TBX3 (−16212); chr12:115173644-115173721/TBX3 (−51714);
chr12:115174204-115174372/TBX3 (−52319); chr12:116061886-116061975/TBX3 (−939962), MED13L (+6530
60); chr12:116715479-116715507/MED13L (−502); chr12:116946200-116946250/MED13L (−231234), MAP1LC
3B2 (−50961); chr12:116971186-116971210/MED13L (−256207), MAP1LC362 (−25988); chr12:117175676-1171
75712/RNFT2 (−402), C12orf49 (+149); chr12:117482952-117483055/TESC (+54247), FBXW8 (+134243); chr1
2:117771459-117771510/FBXO21 (−143185), NOS1 (+28122); chr12:117798455-117799069/NOS1 (+845); chr
12:117799279-117799330/NOS1 (+302); chr12:119212200-119212318/SRRM4 (−207041), SUDS3 (+397901);
chr12:119419324-119419368/SRRM4 (+46); chr12:120032431-120032454/PRKAB1 (−73318), TMEM233 (+117
9); chr12:120875971-120876009/COX6A1 (+86); chr12:120972385-120972414/RNF10 (+268); chr12:12101874
5-121018809/POP5 (+424); chr12:121078324-121078357/CABP1 (−81); chr12:121079341-121079420/CABP1
(+959); chr12:121341588-121341649/SPPL3 (+536); chr12:121530597-121530651/OASL (−53844), P2RX7 (−39
998); chr12:121735577-121735630/CAMKK2 (+507); chr12:121837619-121837660/RNF34 (−262); chr12:12201
6655-122016849/KDM2B (+2168), RNF34 (+178850); chr12:122065765-122065827/TMEM120B (−84862), ORA
I1 (+1341); chr12:122227929-122227995/RHOF (+3632), TMEM120B (+77304); chr12:122231057-122231148/
RHOF (+491); chr12:122240919-122240973/SETD18 (−1692); chr12:122442261-122442329/BCL7A (−17566),
WDR66 (+85832); chr12:122669142-122669185/B3GNT4 (−19064), IL31 (−10418); chr12:122906885-12290690
4/CLIP1 (+221); chr12:123259687-123259752/CCDC62 (+664); chr12:123450922-123450965/ABCB9 (+112); c
hr12:123518668-123518818/ARL6IP4 (+53863), PITPNM2 (+76292); chr12:123717466-123717661/C12orf65
(−280); chr12:123873289-123873313/SETD8 (+4597), RILPL2 (+47963); chr12:123915938-123916040/RILPL2
(+5275), SETD8 (+47285); chr12:124068959-124068990/TMED2 (−101); chr12:124155353-124155457/TCTN2 (−2
55); chr12:124246390-124246445/DNAH10 (−624); chr12:124457060-124457082/ZNF664 (−691); chr12:124781
163-124781200/NCOR2 (+270828), ZNF664 (+323420); chr12:124873546-124873721/NCOR2 (+178376), ZNF
664 (+415872); chr12:124874062-124874106/NCOR2 (+177926), ZNF664 (+416322); chr12:124876991-12487
7052/NCOR2 (+174988), ZNF664 (+419260); chr12:124941845-124941950/NCOR2 (+110112), ZNF664 (+484
136); chr12:124942236-124942316/NCOR2 (+109734), ZNF664 (+484514); chr12:125005721-125005844/NCO
R2 (+46227), ZNF664 (+548021); chr12:125039318-125039419/NCOR2 (+12641), ZNF664 (+581607); chr12:1
25052213-125052265/NCOR2 (−229); chr12:125353642-125353738/SCARB1 (−5171), UBC (+45897); chr12:12
5670261-125670334/TMEM132B (−140864), AACS (+120373); chr12:127210778-127210895/NONE; chr12:127
211033-127211063/NONE; chr12:127630654-127630798/NONE; chr12:127940393-127940454/TMEM132C (−8
11524); chr12:127940558-127940587/TMEM132C (−811375); chr12:127940688-127940852/TMEM132C (−8111
78); chr12:128675290-128675354/TMEM132C (−76626); chr12:128873180-128873290/TMEM132C (+121287),
SLC15A4 (+435306); chr12:129338109-129338192/GLT1D1 (+70); chr12:129338826-129338851/GLT1D1 (+75
8); chr12:130387550-130387796/TMEM132D (+539); chr12:130388018-130388135/TMEM132D (+135); chr12:
130388657-130388944/TMEM132D (−589); chr12:130526888-130526931/TMEM132D (−138698), FZD10 (−1200
94); chr12:130529157-130529217/TMEM132D (−140975), FZD10 (−117817); chr12:130646654-130646755/FZD
10 (−299); chr12:130647133-130647214/FZD10 (+170); chr12:130647435-130647543/FZD10 (+485); chr12:130
647909-130647950/FZD10 (+926); chr12:130648125-130648818/PIWIL1 (−173961), FZD10 (+1468); chr12:130
649126-130649260/PIWIL1 (−173240), FZD10 (+2189); chr12:130765916-130765932/PIWIL1 (−56509), FZD10
(+118920); chr12:130823873-130823917/PIWIL1 (+1462), RIMBP2 (+178567); chr12:131260513-131260561/RI
MBP2 (−258075), STX2 (+63274); chr12:131464567-131464617/SFSWAP (−731043), GPR133 (+26140); chr12:
131783246-131783291/SFSWAP (−412366), GPR133 (+344817); chr12:131783422-131783702/SFSWAP (−412
073), GPR133 (+345110); chr12:132146199-132146540/SFSWAP (−49265), GPR133 (+707918); chr12:132146
653-132146752/SFSWAP (−48932), GPR133 (+708251); chr12:132312830-132312856/MMP17 (−98); chr12:132
337633-132337686/ULK1 (−41619), MMP17 (+24719); chr12:132381558-132381695/PUS1 (−32186), ULK1 (+2
348); chr12:132628365-132628401/NOC4L (−610), DDX51 (+497); chr12:132657818-132657946/NOC4L (+288
89), GALNT9 (+248023); chr12:132905535-132905551/GALNT9 (+362); chr12:132905652-132905713/GALNT9
(+222); chr12:132906025-132906202/GALNT9 (−209); chr12:132906354-132906392/GALNT9 (−468); chr12:13
2970577-132970683/P2RX2 (−224773), GALNT9 (−64725); chr12:133016005-133016128/P2RX2 (−179336), GA
LNT9 (−110162); chr12:133021467-133021524/P2RX2 (−173907), GALNT9 (−115591); chr12:133053668-13305
3764/GALNT9 (−147811), P2RX2 (−141687); chr12:133175547-133175588/GALNT9 (−269663), P2RX2 (−19835);
chr12:133195229-133195428/P2RX2 (−74); chr12:133195940-133195965/P2RX2 (+550); chr12:133345275-13
3345321/ANKLE2 (−6847), GOLGA3 (+59990); chr12:133481383-133481489/CHFR (−17232), ZNF605 (+51456);
chr12:133484965-133485046/CHFR (−20802), ZNF605 (+47886); chr12:133485348-133485439/CHFR (−2119
0), ZNF605 (+47498); chr12:133485690-133485815/CHFR (−21549), ZNF605 (+47139); chr12:133553643-1335
53700/ZNF605 (−20780), ZNF26 (−9384); chr12:133613775-133613813/ZNF84 (−186); chr12:133707261-13370
7315/ZNF10 (+74); chr13:19918724-19918765/TUBA3C (−162753), TPTE2 (+192158); chr13:19919069-199191
25/TUBA3C (−163105), TPTE2 (+191806); chr13:20176683-20176804/TPTE2 (−65841), MPHOSPH8 (−31044);
chr13:20438932-20439012/ZMYM5 (−1196); chr13:20532107-20532173/ZMYM2 (−670); chr13:20702495-20702
531/GJA3 (+32670), ZMYM2 (+169703); chr13:20716423-20716640/GJA3 (+18651), ZMYM2 (+183722); chr13:
20763427-20763462/GJA3 (−28262), GJB2 (+3669); chr13:20767761-20767827/GJB2 (−680); chr13:20805588-
20805728/GJB6 (+876); chr13:20875629-20876019/GJB6 (−69290), CRYL1 (+224188); chr13:21295855-21295
877/IL17D (+18384), N6AMT2 (+52191); chr13:21520358-21520551/XPO4 (−43542), LATS2 (+115267); chr13:2
1635756-21635777/LATS2 (−45); chr13:21750979-21751009/SKA3 (−253), MRP63 (+622); chr13:21872852-218
72941/SKA3 (−122156), ZDHHC20 (+160611); chr13:22033216-22033256/ZDHHC20 (+272); chr13:22177982-2
2178023/EFHA1 (+352); chr13:23500637-23500876/SGCG (−254303); chr13:23734298-23734814/SGCG (−205
04); chr13:24463000-24463056/C1QTNF9B-AS1 (−564), MIPEP (+559); chr13:24463281-24463332/C1QTNF9B-
AS1 (−285), MIPEP (+280); chr13:24478017-24478110/SPATA13 (−256797), C1QTNF9B (−6919); chr13:24553
864-24553924/SPATA13 (−180967), C1QTNF9B (−82749); chr13:24839234-24839388/C1QTNF9 (−44405), SPA
TA13 (+104450); chr13:25086908-25086946/PARP4 (+21); chr13:25115648-25115693/ATP12A (−138878), PA
RP4 (−28723); chr13:25115907-25116223/ATP12A (−138484), PARP4 (−29117); chr13:25254841-25254861/AT
P12A (+302); chr13:25319905-25320108/RNF17 (−18294), ATP12A (+65458); chr13:25320246-25320375/RNF
17 (−17990), ATP12A (+65762); chr13:25320540-25320613/RNF17 (−17724), ATP12A (+66028); chr13:2532102
9-25321112/RNF17 (−17230), ATP12A (+66522); chr13:25322194-25322238/RNF17 (−16085), ATP12A (+6766
7); chr13:25506123-25506195/PABPC3 (−164117), CENPJ (−9074); chr13:25592566-25592593/CENPJ (−95495),
PABPC3 (−77696); chr13:25593040-25593061/CENPJ (−95966), PABPC3 (−77225); chr13:25621206-2562126
3/CENPJ (−124150), PABPC3 (−49041); chr13:25744735-25745300/PABPC3 (+74742), MTMR6 (+116686); chr
13:25745595-25745726/PABPC3 (+75385), MTMR6 (+116043); chr13:25746081-25746119/PABPC3 (+75824),
MTMR6 (+115604); chr13:25794284-25794425/MTMR6 (+67349), PABPC3 (+124079); chr13:25875842-25875
892/NUPL1 (+201); chr13:25876011-25876046/NUPL1 (+363); chr13:25946018-25946300/ATP8A2 (−50); chr13:
25946674-25946801/ATP8A2 (+529); chr13:26042708-26042768/ATP8A2 (+96529), SHISA2 (+582460); chr13:
26043171-26043340/ATP8A2 (+97047), SHISA2 (+581942); chr13:26551514-26551585/SHISA2 (+73648), AT
P8A2 (+605341); chr13:26586752-26586839/SHISA2 (+38402), ATP8A2 (+640587); chr13:26624388-2662442
5/SHISA2 (+791); chr13:26625198-26625266/SHISA2 (−34); chr13:26625716-26625841/SHISA2 (−581); chr13:2
6647639-26647724/SHISA2 (−22484), RNF6 (+148826); chr13:26760763-26760795/SHISA2 (−135581), RNF6
(+35729); chr13:27131829-27131859/WASF3 (+4); chr13:27132310-27132629/WASF3 (+630); chr13:27825351-
27825385/RPL21 (−324); chr13:28194183-28194268/POLR1D (−1690), LNX2 (+494); chr13:28364095-2836415
0/GSX1 (−2657); chr13:28364696-28364723/GSX1 (−2070); chr13:28366602-28366664/GSX1 (−147); chr13:283
67039-28367253/GSX1 (+366); chr13:28367946-28368153/PDX1 (−126118), GSX1 (+1270); chr13:28369071-2
8369161/PDX1 (−125052), GSX1 (+2336); chr13:28370424-28370502/PDX1 (−123705), GSX1 (+3683); chr13:2
8493310-28493345/PDX1 (−840); chr13:28498358-28498986/PDX1 (+4504), CDX2 (+44645); chr13:28500895-
28500954/PDX1 (+6757), CDX2 (+42392); chr13:28501125-28501150/PDX1 (+6970), CDX2 (+42179); chr13:2
8501937-28502077/PDX1 (+7839), CDX2 (+41310); chr13:28502742-28502812/PDX1 (+8609), CDX2 (+40540);
chr13:28503274-28503358/PDX1 (+9148), CDX2 (+40001); chr13:28535270-28535305/CDX2 (+8029), PDX1
(+41120); chr13:28541100-28541179/CDX2 (+2177), PDX1 (+46972); chr13:28544585-28544665/CDX2 (−1308);
chr13:28549945-28550239/CDX2 (−6775), PRHOXNB (+12682); chr13:28551549-28551658/CDX2 (−8287), P
RHOXNB (+11170); chr13:28552385-28552659/CDX2 (−9205), PRHOXNB (+10252); chr13:28554359-2855454
3/CDX2 (−11134), PRHOXNB (+8323); chr13:28674227-28674397/FLT3 (+417); chr13:29068986-29068993/FL
T1 (+275); chr13:29106815-29106898/POMP (−126284), FLT1 (−37592); chr13:29107064-29107233/POMP (−12
5992), FLT1 (−37884); chr13:30688968-30689006/UBL3 (−264167), KATNAL1 (+192176); chr13:30707204-3070
7244/UBL3 (−282404), KATNAL1 (+173939); chr13:31019984-31020055/KATNAL1 (−138857), HMGB1 (+20061);
chr13:31248065-31248116/ALOX5AP (−39524), USPL1 (+56261); chr13:31480504-31480656/ALOX5AP (+19
2965), HSPH1 (+255537); chr13:31480870-31481052/ALOX5AP (+193346), HSPH1 (+255156); chr13:3260532
5-32605442/FRY (−53); chr13:32605624-32605674/FRY (+212); chr13:33161272-33161316/PDS5B (+730); chr
13:33590658-33591066/KL (+291); chr13:34116683-34116717/RFC3 (−275506), STARD13 (−256799); chr13:35
324657-35324665/NBEA (−191763), RFC3 (+932455); chr13:35517004-35517052/NBEA (+604); chr13:355173
73-35517409/NBEA (+967); chr13:36045213-36045321/MAB21L1 (+470115), NBEA (+528843); chr13:3604933
4-36049572/MAB21L1 (+465929), NBEA (+533029); chr13:36049759-36049787/MAB21L1 (+465609), NBEA
(+533349); chr13:36050774-36050905/MAB21L1 (+464542), NBEA (+534416); chr13:36052553-36052827/MAB2
1L1 (+462692), NBEA (+536266); chr13:36705566-36705621/DCLK1 (−80); chr13:36728991-36729246/DCLK1
(−23605), CCDC169-SOHLH2 (+142873); chr13:36871607-36871670/CCDC169-SOHLH2 (+353); chr13:368719
72-36872032/CCDC169-SOHLH2 (−10); chr13:36920224-36920266/SPG20 (+401); chr13:36920387-36920464/
SPG20 (+220); chr13:37005581-37005720/CCNA1 (−758); chr13:37006202-37006433/CCNA1 (−91); chr13:370
06658-37006733/CCNA1 (+287); chr13:37248149-37248243/SERTM1 (+147); chr13:37248994-37249039/SER
TM1 (+968); chr13:37494107-37494124/SMAD9 (+293); chr13:38443432-38443479/TRPC4 (+483); chr13:3844
3716-38443934/TRPC4 (+114); chr13:38444151-38444226/TRPC4 (−250); chr13:39261783-39261928/FREM2
(+683); chr13:39262030-39262129/FREM2 (+907); chr13:43148375-43148495/TNFSF11 (+144); chr13:4359763
5-43597689/DNAJC15 (+300); chr13:44359980-44360043/SERP2 (−587966), ENOX1 (−156399); chr13:443602
79-44360467/SERP2 (−587605), ENOX1 (−156760); chr13:44360794-44360995/SERP2 (−587083), ENOX1 (−15
7282); chr13:44361593-4436183/SERP2 (−586340), ENOX1 (−158025); chr13:44947700-44947725/SERP2 (−2
65); chr13:45150738-45150766/TSC22D1 (−51); chr13:45492239-45492271/TSC22D1 (−341554), NUFIP1 (+71
358); chr13:46039471-46039531/COG3 (+471); chr13:46189934-46190006/SPERT (−86476), COG3 (+150940);
chr13:46425555-46425575/SIAH3 (+281); chr13:46425789-46425855/SIAH3 (+24); chr13:46626241-46626295/
ZC3H13 (+626); chr13:47012298-47012316/KIAA0226L (−50672), ESD (+359060); chr13:49107168-49107192/
RCBTB2 (+136); chr13:49550736-49550781/FNDC3A (+711); chr13:49794926-49795540/MLNR (+759); chr13:
49822278-49822314/CDADC1 (+249); chr13:50070153-50070315/PHF11 (+433); chr13:50070658-50070684/P
HF11 (+870); chr13:50159828-50159866/RCBTB1 (−128); chr13:50202847-50202964/ARL11 (+471); chr13:506
54261-50654311/ST13P4 (−91868), KCNRG (+64896); chr13:50701689-50701959/ST13P4 (−44330), KCNRG
(+112434); chr13:50706908-50707042/ST13P4 (−39179), KCNRG (+117585); chr13:50707621-50707711/ST13P
4 (−38488), KCNRG (+118276); chr13:51417603-51417906/RNASEH2B (−66059), ST13P4 (+671601); chr13:52
025886-52025906/INTS6 (+1379), SERPINE3 (+110728); chr13:52027224-52027258/INTS6 (+34); chr13:5276
8301-52768350/NEK3 (−34330), THSD1 (+212303); chr13:52980515-52980573/THSD1 (+85); chr13:53174624-
53174656/HNRNPA1L2 (−16965), CKAP2 (+145145); chr13:53191405-53191417/HNRNPA1L2 (−194); chr13:53
313314-53313512/LECT1 (+534); chr13:53313613-53313677/LECT1 (+302); chr13:53313950-53314030/LECT
1 (−43); chr13:53420029-53420065/LECT1 (−106100), PCDH8 (+2728); chr13:53420208-53420877/LECT1 (−10
6596), PCDH8 (+2232); chr13:53421000-53421826/LECT1 (−107466), PCDH8 (+1362); chr13:53422252-53422
432/PCDH8 (+433); chr13:53774952-53775398/OLFM4 (+172299); chr13:53776135-53776207/OLFM4 (+1732
95); chr13:58205000-58205044/PCDH17 (−767); chr13:58206232-58206452/PCDH17 (+553); chr13:58206772-
58206861/PCDH17 (+1028); chr13:58207401-58207567/PCDH17 (+1695); chr13:58207814-58207891/PCDH1
7 (+2064); chr13:61165578-61165696/TDRD3 (+194210), PCDH20 (+824018); chr13:61987962-61987997/PCD
H20 (+1675); chr13:61989193-61989219/PCDH20 (+449); chr13:67804531-67804644/PCDH9 (−120); chr13:67
804768-67804863/PCDH9 (−348); chr13:67805286-67805379/PCDH9 (−865); chr13:70681778-70681866/KLHL
1 (+803); chr13:73632865-73632890/KLF5 (−264); chr13:76054939-76055007/TBC1D4 (+1277); chr13:7760137
5-77601407/FBXL3 (−60); chr13:79161838-79161907/EDNRB (−667970), POU4F1 (+15822); chr13:79169716-7
9169849/EDNRB (−675880), POU4F1 (+7912); chr13:79170114-79170211/EDNRB (−676260), POU4F1 (+7532);
chr13:79170384-79170467/EDNRB (−676523), POU4F1 (+7269); chr13:79175944-79176077/EDNRB (−68210
8), POU4F1 (+1684); chr13:79176431-79176566/EDNRB (−682596), POU4F1 (+1196); chr13:79177185-791773
05/POU4F1 (+450); chr13:79177623-79177650/POU4F1 (+58); chr13:79177762-79177885/POU4F1 (−129); chr
13:79182115-79182150/POU4F1 (−4438); chr13:84453842-84454005/SLITRK1 (+2604); chr13:84454250-8445
4310/SLITRK1 (+2248); chr13:88323831-88323867/SLITRK5 (−1021); chr13:88324519-88324575/SLITRK5 (−32
3); chr13:88324747-88324763/STLIRK5 (−115); chr13:88326708-88326936/SLITRK5 (+1952); chr13:91827441-
91827599/GPC5 (−223415); chr13:92051514-92051772/GPC5 (+708); chr13:93879776-93879918/GPC6 (+769);
chr13:93880217-93880533/GPC6 (+1297); chr13:93880738-93880793/GPC6 (+1688); chr13:95201950-95202
013/DCT (−70046), TGDS (+46529); chr13:95248482-95248546/TGDS (−3); chr13:95354840-95355116/SOX21
(+9411), GPR180 (+100874); chr13:95363452-95363493/SOX21 (+916); chr13:95363960-95364064/SOX21
(+377); chr13:95364291-95364329/SOX21 (+79); chr13:95365457-95365497/SOX21 (−1088); chr13:95620782-95
620853/SOX21 (−256429), ABCC4 (+332869); chr13:96056516-96056547/CLDN10 (−148415), ABCC4 (−102845);
chr13:96130850-96130913/ABCC4 (−177195), CLDN10 (−74065); chr13:96204668-96204922/CLDN10 (−152);
chr13:96294364-96294542/DZIP1 (+2504), CLDN10 (+89506); chr13:96296346-96296372/DZIP1 (+598); chr1
3:96296556-96296840/DZIP1 (+259); chr13:96296950-96296991/DZIP1 (−14); chr13:99405000-99405089/SLC
15A1 (−116); chr13:99853278-99853318/UBAC2 (+619); chr13:100259159-100259185/CLYBL (+253); chr13:10
0310843-100310935/CLYBL (+51970), ZIC5 (+313289); chr13:100547894-100548075/ZIC5 (+76193), CLYBL
(+289066); chr13:100548305-100548324/ZIC5 (+75863), CLYBL (+289396); chr13:100548512-100548649/ZIC5
(+75597), CLYBL (+289662); chr13:100608036-100608448/ZIC5 (+15936), CLYBL (+349323); chr13:10060880
5-100608838/ZIC5 (+15356), CLYBL (+349903); chr13:100620485-100620515/ZIC5 (+3678), CLYBL (+361581);
chr13:100620620-100620631/ZIC5 (+3552), CLYBL (+361707); chr13:100622031-100622155/ZIC5 (+2085), C
LYBL (+363174); chr13:100624233-100624323/ZIC5 (−100); chr13:100627928-100628071/ZIC5 (−3822); chr13:
100630299-100630328/ZIC2 (−3712); chr13:100634745-100634940/ZIC2 (+817); chr13:100635330-100635398/
PCCA (−105905), ZIC2 (+1338); chr13:100635518-100635597/PCCA (−105711), ZIC2 (+1532); chr13:10063611
1-100636130/PCCA (−105148), ZIC2 (+2095); chr13:100641638-100641769/PCCA (−99565), ZIC2 (+7678); chr
13:100642486-100642614/PCCA (−98719), ZIC2 (+8524); chr13:100643667-100643790/PCCA (−97540), ZIC2
(+9703); chr13:100644180-100644218/PCCA (−97070), ZIC2 (+10173); chr13:100649583-100649672/PCCA (−9
1641), ZIC2 (+15602); chr13:100649885-100649944/PCCA (−91354), ZIC2 (+15889); chr13:100926036-100926
147/PCCA (+184823), A2LD1 (+259964); chr13:101327146-101327189/TMTC4 (−65); chr13:102068358-10206
8417/NALCN (+425); chr13:102068646-102068811/NALCN (+84); chr13:102069071-102069256/NALCN (−351);
chr13:102568573-102568659/ITGBL1 (+463650), FGF14 (+485508); chr13:102568768-102569203/ITGBL1 (+4
64020), FGF14 (+485138); chr13:103426388-103426431/METTL21C (−79556), KDELC1 (+24994); chr13:10345
2645-103452670/KDELC1 (−1254); chr13:108518354-108518444/FAM155A (+1061); chr13:108519431-108519
564/FAM155A (−38); chr13:108519746-108519901/FAM155A (−364); chr13:108520097-108520309/FAM155A
(−743); chr13:108520535-108520701/FAM155A (−1158); chr13:108520826-108520915/FAM155A (−1411); chr13:
108867835-108867873/ABHD13 (−2909), LIG4 (+28); chr13:109147866-109147999/MYO16 (−100567), TNFSF1
3B (+225956); chr13:109148279-109148376/MYO16 (−100172), TNFSF13B (+226351); chr13:109792906-1097
93284/MYO16 (+544595), IRS2 (+645819); chr13:109793427-109793463/MYO16 (+544945), IRS2 (+645469);
chr13:110052679-110052721/IRS2 (+386214), MYO16 (+804200); chr13:110437505-110437578/IRS2 (+1372);
chr13:110438246-110438287/IRS2 (+647); chr13:110950784-110950839/IRS2 (−511898), COL4A1 (+8684); ch
r13:110959054-110959517/COL4A2 (−345), COL4A1 (+210); chr13:110959649-110959752/COL4A1 (−205), CO
L4A2 (+70); chr13:110960143-110960344/COL4A1 (−748), COL4A2 (+613); chr13:110964145-110964286/COL
4A1 (−4720), COL4A2 (+4585); chr13:111214430-111214475/RAB20 (−382); chr13:111365679-111365806/ING
1 (−1616); chr13:111368008-111368030/ING1 (+660); chr13:111464780-111464916/ARHGEF7 (−302776), ING
1 (+97489); chr13:111465044-111465089/ARHGEF7 (−302557), ING1 (+97708); chr13:111718992-111719070/
ARHGEF7 (−48593), ING1 (+351672); chr13:111768118-111768416/ARHGEF7 (+643); chr13:111768541-1117
68604/ARHGEF7 (+949); chr13:112547631-112547690/SOX1 (−174252), C13orf16 (+574646); chr13:11254801
2-112548051/SOX1 (−173881), C13orf16 (+575017); chr13:112548550-112548642/SOX1 (−173317), C13orf16
(+575581); chr13:112708005-112708307/SOX1 (−13757), C13orf16 (+735141); chr13:112710253-112710359/S
OX1 (−11607), C13orf16 (+737291); chr13:112710476-112710635/SOX1 (−11357), C13orf16 (+737541); chr13:1
12711294-112711375/SOX1 (−10578), C13orf16 (+738320); chr13:112715719-112715803/SOX1 (−6152), C13o
rf16 (+742746); chr13:112717243-112717322/SOX1 (−4630); chr13:112721027-112721136/SOX1 (−831); chr13:
112721475-112722094/SOX1 (−128); chr13:112722221-112722274/SOX1 (+335); chr13:112722403-11272259
7/SOX1 (+587); chr13:112723070-112723154/SPACA7 (−307539), SOX1 (+1199); chr13:112726293-11272643
5/SPACA7 (−304287), SOX1 (+4451); chr13:112726729-112726796/SPACA7 (−303888), SOX1 (+4850); chr13:
112727220-112727698/SPACA7 (−303192), SOX1 (+5546); chr13:112727879-112727961/SPACA7 (−302731),
SOX1 (+6007); chr13:112728201-112728335/SPACA7 (−302383), SOX1 (+6355); chr13:112732766-112732827/
SPACA7 (−297854), SOX1 (+10884); chr13:112758373-112758495/SPACA7 (−272217), SOX1 (+36521); chr13:
112758784-112758867/SPACA7 (−271825), SOX1 (+36913); chr13:112759034-112759111/SPACA7 (−271578),
SOX1 (+37160); chr13:112759781-112760006/SPACA7 (−270757), SOX1 (+37981); chr13:112985423-112985
452/SPACA7 (−45213), SOX1 (+263525); chr13:112985553-112985585/SPACA7 (−45082), SOX1 (+263656); ch
r13:113528543-113528575/MCF2L (−94976), ATP11A (+183916); chr13:113652295-113652318/F7 (−107798),
MCF2L (+28772); chr13:113734977-113735033/F7 (−25100), MCF2L (+111470); chr13:113763950-113764088/
F10 (−13094), F7 (+3914); chr13:113764355-113764766/F10 (−12552), F7 (+4456); chr13:113765134-11376538
7/F10 (−11852), F7 (+5156); chr13:113807392-113807542/PROZ (−5501), F10 (+30354); chr13:113951118-113
951172/LAMP1 (−324); chr13:113951396-113951413/LAMP1 (−64); chr13:113951716-113951766/LAMP1 (+272);
chr13:114017945-114017991/GRTP1 (+495); chr13:114145249-114145270/TMCO3 (−48); chr13:114146137-
114146160/TMCO3 (+841); chr13:114239224-114239246/TFDP1 (+179); chr13:114261985-114262074/TFDP1
(+22974), ATP4B (+50483); chr13:114462807-114462866/FAM70B (+621); chr13:114566271-114566409/GAS
6 (+706); chr13:114830746-114830818/GAS6 (−263736), RASA3 (+67313); chr13:114875934-114876221/GAS
6 (−309032), RASA3 (+22017); chr13:114894153-114894280/GAS6 (−327171), RASA3 (+3878); chr13:1148960
49-114896191/GAS6 (−329074), RASA3 (+1975); chr13:114932050-114932215/CDC16 (−68229), RASA3 (−340
38); chr13:115046956-115047005/UPF3A (−78); chr14:19403296-19403330/OR11H12 (+25719), OR11H2 (+77
9178); chr14:20929224-20929256/TMEM55B (+397); chr14:20929539-20929605/TMEM55B (+65); chr14:21091
112-21091156/RNASE12 (−32152), OR6S1 (+18716); chr14:21092167-21092216/RNASE12 (−33210), OR6S1
(+17658); chr14:21094032-21094124/RNASE12 (−35096), OR6S1 (+15772); chr14:21101011-21101037/RNASE
12 (−42042), OR6S1 (+8826); chr14:21121217-21121262/RNASE4 (−35692), OR6S1 (−11390); chr14:21121917-
21121970/RNASE4 (−34988), OR6S1 (−12094); chr14:21493197-21493230/NDRG2 (+50); chr14:21494070-214
94160/TPPP2 (−4230), NDRG2 (−851); chr14:21539969-21540023/C14orf176 (−27100), ARHGEF40 (+1469); ch
r14:21852134-21852194/SUPT16H (+261); chr14:21924263-21924333/CHD8 (−24431), RAB2B (+20834); chr1
4:21945659-21945719/RAB2B (−557), TOX4 (+354); chr14:21994132-21994155/METTL3 (−14687), SALL2 (+11
193); chr14:23235774-23235832/OXA1L (+72); chr14:23299038-23299065/MRPL52 (−40); chr14:23305834-233
05961/MMP14 (+105); chr14:23398436-23398497/PRMT5 (+194); chr14:23770640-23770682/HOMEZ (−15352),
BCL2L2-PABPN1 (−5310); chr14:23821281-23821317/SLC22A17 (+361); chr14:23821576-23821601/SLC22A
17 (+71); chr14:23834788-23835314/EFS (−209); chr14:24020690-24020704/THTPA (−4501), ZFHX2 (+161); ch
r14:24025151-24025214/ZFHX2 (−4325), THTPA (−15); chr14:24045278-24045385/AP1G2 (−8053), JPH4 (+267
7); chr14:24045565-24045917/AP1G2 (−8462), JPH4 (+2268); chr14:24046361-24046394/AP1G2 (−9099), JPH
4 (+1631); chr14:24521457-24521486/CPNE6 (−19264), DHRS4 (+98507); chr14:24563712-24563760/PCK2
(+253); chr14:24601570-24601641/PSME1 (−3772), FITM1 (+931); chr14:24605275-24605296/PSME1 (−92); chr1
4:24640785-24641009/REC8 (−337); chr14:24641361-24641413/REC8 (+153); chr14:24711570-24711617/TIN
F2 (+286); chr14:24780761-24780824/CIDEB (−217), LTB4R (+88); chr14:24801500-24801528/ADCY4 (+2763),
LTB4R (+20809); chr14:24802022-24802151/ADCY4 (+2190), LTB4R (+21382); chr14:24804351-24804424/A
DCY4 (−111); chr14:24912068-24912085/SDR39U1 (−70); chr14:26674084-26674208/NOVA1 (+392814); chr14:
27066052-27066140/NOVA1 (+864); chr14:28733652-28733668/FOXG1 (−502627); chr14:29231186-2923128
3/FOXG1 (−5052); chr14:29235309-29235341/FOXG1 (−962); chr14:29235752-29235826/FOXG1 (−498); chr14:
29236823-29236859/FOXG1 (+554); chr14:29237067-29237139/FOXG1 (+816); chr14:29237267-29237282/F
OXG1 (+988); chr14:29237444-29237573/FOXG1 (+1222); chr14:29243670-29243730/FOXG1 (+7413); chr14:
29254440-29254611/FOXG1 (+18239); chr14:31495850-31495898/STRN3 (−267); chr14:32547388-32547438/
ARHGAP5 (+918); chr14:32670957-32670996/AKAP6 (−127502), ARHGAP5 (+124482); chr14:33402225-3340
2367/NPAS3 (−6163), AKAP6 (+603817); chr14:34269792-34269840/EGLN3 (+150468), NPAS3 (+861357); chr
14:35591674-35591704/PPP2R3C (−170), KIAA0391 (−87); chr14:35873764-35873798/NFKBIA (+179); chr14:3
6003957-36004080/INSM2 (+771); chr14:36004735-36004821/INSM2 (+1530), RALGAPA1 (+273654); chr14:3
6004922-36005011/INSM2 (+1719), RALGAPA1 (+273465); chr14:36789347-36789412/MBIP (+502); chr14:36
974928-36974967/MBIP (−185066), NKX2-1 (+14482); chr14:36975229-36975280/MBIP (−185373), NKX2-1 (+1
4175); chr14:36975640-36975682/MBIP (−185779), NKX2-1 (+13769); chr14:36977930-36977974/MBIP (−1880
70), NKX2-1 (+11478); chr14:36982696-36982869/MBIP (−192901), NKX2-1 (+6647); chr14:36983600-3698367
3/MBIP (−193755), NKX2-1 (+5793); chr14:36986472-36987198/MBIP (−196953), NKX2-1 (+2595); chr14:36989
341-36989403/NKX2-1 (+58); chr14:36991033-36991094/NKX2-1 (−1634); chr14:36991778-36991988/NKX2-1
(−2453); chr14:36992164-36992221/NKX2-1 (−2763); chr14:36993488-36993693/NKX2-1 (−4161); chr14:370491
27-37049158/NKX2-1 (−59713), NKX2-8 (+2643); chr14:37050040-37050094/NKX2-1 (−60637), NKX2-8 (+1719);
chr14:37053134-37053322/NKX2-8 (−1442); chr14:37053498-37053600/NKX2-8 (−1763); chr14:37116295-371
16552/NKX2-8 (−64638), PAX9 (−10349); chr14:37116666-37116771/NKX2-8 (−64933), PAX9 (−10054); chr14:3
7124194-37124481/PAX9 (−2435); chr14:37125652-37125763/PAX9 (−1065); chr14:37126714-37126964/PAX9
(+66); chr14:37127780-37128012/PAX9 (+1123), SLC25A21 (+513969); chr14:37132062-37132290/PAX9 (+54
03), SLC25A21 (+509689); chr14:37132554-37132602/PAX9 (+5805), SLC25A21 (+509287); chr14:37135636-
37135739/PAX9 (+8915), SLC25A21 (+506177); chr14:37136121-37136293/PAX9 (+9434), SLC25A21 (+5056
58); chr14:37145583-37145647/PAX9 (+18842), SLC25A21 (+496250); chr14:37666686-37666726/SLC25A21
(−24841), FOXA1 (+397783); chr14:38057418-38057438/SLC25A21 (−415563), FOXA1 (+7061); chr14:3806091
7-38061159/SLC25A21 (−419173), FOXA1 (+3451); chr14:38061290-38061332/SLC25A21 (−419446), FOXA1
(+3178); chr14:38066924-38066969/FOXA1 (−2458); chr14:38067530-38067610/FOXA1 (−3081); chr14:3806788
0-38067934/FOXA1 (−3418); chr14:38071297-38071341/TTC6 (−193156), FOXA1 (−6830); chr14:38080313-380
80668/TTC6 (−183984), FOXA1 (−16002); chr14:38091479-38091550/TTC6 (−172960), FOXA1 (−27026); chr14:
38680046-38680115/SSTR1 (+2877), CLEC14A (+45493); chr14:38680721-38680742/SSTR1 (+3528), CLEC1
4A (+44842); chr14:38724526-38724545/CLEC14A (+1038), SSTR1 (+47332); chr14:38725360-38725454/CLE
C14A (+167); chr14:42074587-42074668/LRFN5 (−2136); chr14:42075323-42075396/LRFN5 (−1404); chr14:42
076044-42076105/LRFN5 (−689); chr14:42077368-42077488/LRFN5 (+664); chr14:42078765-42078799/LRFN
5 (+2018); chr14:45381560-45381569/FSCB (−405066), FAM179B (−49851); chr14:45431149-45431187/FAM17
9B (−248); chr14:45431696-45431722/FAM179B (+293); chr14:48143537-48143617/MDGA2 (+580); chr14:481
43719-48143797/MDGA2 (+399); chr14:48143958-48144358/MDGA2 (−1); chr14:48144764-48145236/MDGA2
(−843); chr14:48145362-48145469/MDGA2 (−1259); chr14:50154784-50154840/POLE2 (+286); chr14:50160193-
50160247/KLHDC1 (+397); chr14:50582908-50582970/METTL21D (+358); chr14:50698742-50698767/SOS2
(−656); chr14:51134674-51134749/SAV1 (+311); chr14:51296786-51296865/SAV1 (−161803), NIN (+1013); chr1
4:51338732-51339047/ABHD12B (+12); chr14:51560714-51560770/PYGL (−149494), TRIM9 (+1680); chr14:52
535027-52535055/NID2 (+905); chr14:52535264-52535334/NID2 (+647); chr14:52536105-52536342/NID2 (−27
8); chr14:52735002-52735044/PTGDR (+592); chr14:52735424-52735451/PTGER2 (−45578), PTGDR (+1007);
chr14:53196654-53196689/STYX (−211); chr14:54413278-54413708/DDHD1 (−793447), BMP4 (+7777); chr14:5
4421801-54421831/BMP4 (−546); chr14:54686139-54686274/BMP4 (−264937), CDKN3 (−177466); chr14:55518
029-55518071/LGALS3 (−77885), SOCS4 (+24206); chr14:55518883-55518942/LGALS3 (−77022), SOCS4 (+2
5069); chr14:55738006-55738050/DLGAP5 (−79632), ATG14 (+140548); chr14:55738389-55738457/DLGAP5
(−80027), ATG14 (+140153); chr14:56047684-56047741/KTN1 (+788); chr14:57261095-57261174/OTX2 (+1604
9), C14orf101 (+214624); chr14:57261408-57261465/OTX2 (+15747), C14orf101 (+214926); chr14:57261880-5
7261965/OTX2 (+15261), C14orf101 (+215412); chr14:57264646-57264764/OTX2 (+12479), C14orf101 (+2181
94); chr14:57264867-57265005/OTX2 (+12248), C14orf101 (+218425); chr14:57265356-57265469/OTX2 (+117
71), C14orf101 (+218902); chr14:57265847-57265912/OTX2 (+11304), C14orf101 (+219369); chr14:57270972-
57271153/OTX2 (+6121), C14orf101 (+224552); chr14:57272114-57272210/OTX2 (+5022), C14orf101 (+22565
1); chr14:57275050-57275210/OTX2 (+2054), C14orf101 (+228619); chr14:57275686-57276056/OTX2 (+1313),
C14orf101 (+229360); chr14:57278763-57278837/OTX2 (−1616); chr14:57279565-57279642/OTX2 (−2420); chr
14:57283409-57283445/MUDENG (−452179), OTX2 (−6243); chr14:57284037-57284070/MUDENG (−451552),
OTX2 (−6870); chr14:58332022-58332055/SLC35F4 (+553); chr14:58332518-58332593/SLC35F4 (+36); chr14:
58332708-58332908/SLC35F4 (−216); chr14:58333098-58333161/SLC35F4 (−538); chr14:58893671-58893693/
KIAA0586 (−421), TIMM9 (+550); chr14:59104042-59104060/DACT1 (−706); chr14:59931009-59931023/GPR13
5 (+1043), DAAM1 (+275617); chr14:60386743-60386932/C14orf135 (−171791), RTN1 (−49281); chr14:609519
90-60952195/C14orf39 (+671); chr14:60952420-60952516/C14orf39 (+296); chr14:60952633-60952729/C14orf
39 (+83); chr14:60974008-60974077/SIX6 (−1895); chr14:60975889-60976074/SIX6 (+44); chr14:60976610-60
976802/SIX6 (+768); chr14:60977713-60977879/SIX6 (+1858), SIX1 (+138359); chr14:60981817-60981972/SI
X6 (+5957), SIX1 (+134260); chr14:60982368-60982573/SIX6 (+6533), SIX1 (+133684); chr14:61104155-6110
4241/SIX1 (+11957), SIX6 (+128260); chr14:61104557-61104623/SIX1 (+11565), SIX6 (+128652); chr14:61110
705-61110749/SIX1 (+5428), SIX6 (+134789); chr14:61118633-61118742/SIX1 (−2533); chr14:61747528-61747
582/TMEM30B (+975); chr14:62035389-62035430/HIF1A (−126709), PRKCH (+246895); chr14:62279476-6227
9519/SYT16 (−183043), SNAPC1 (+50423); chr14:62279853-62279898/SYT16 (−182665), SNAPC1 (+50801); c
hr14:62583870-62583918/SYT16 (+121353), KCNH5 (+928061); chr14:63512007-63512063/KCNH5 (−80); chr1
4:63512709-63512740/KCNH5 (−770); chr14:65006715-65006776/HSPA2 (−440); chr14:65007537-65007552/H
SPA2 (+359); chr14:65007692-65007714/HSPA2 (+517); chr14:65008975-65008997/PLEKHG3 (−185325), HS
PA2 (+1800); chr14:65172419-65172456/PLEKHG3 (−21873), HSPA2 (+165252); chr14:65438214-65438257/R
AB15 (+639); chr14:65453681-65453754/RAB15 (−14843), MAX (+115509); chr14:65879627-65879658/FUT8
(+2333); chr14:67878720-67878763/PLEK2 (+86); chr14:69074471-69074560/ZFP36L1 (+188444), RAD51B
(+788020); chr14:69095081-69095106/ZFP36L1 (+167866), RAD51B (+808598); chr14:69414543-69414668/ZFP
36L1 (−151646), ACTN1 (+31477); chr14:70038321-70038347/KIAA0247 (−39976), SLC39A9 (+172949); chr14:
70038590-70038620/KIAA0247 (−39705), SLC39A9 (+173220); chr14:70039623-70039665/KIAA0247 (−38666),
SLC39A9 (+174259); chr14:70655890-70655919/SLC8A3 (−118); chr14:71108228-71108278/TTC9 (−251); chr
14:71374938-71375021/PCNX (+858); chr14:72399246-72399269/RGS6 (+102); chr14:73181116-73181204/D
PF3 (+179649), RGS6 (+782004); chr14:73712377-73712419/PAPLN (+8193), NUMB (+212888); chr14:73712
709-73712888/PAPLN (+8594), NUMB (+212487); chr14:73924557-73924604/NUMB (+705); chr14:74035887-
74035929/ACOT2 (+136); chr14:74100886-74100906/ACOT6 (+17348), PNMA1 (+80232); chr14:74101033-74
101207/ACOT6 (+17572), PNMA1 (+80008); chr14:74179025-74179093/PNMA1 (+2069), ACOT6 (+95511); ch
r14:74226612-74226633/PNMA1 (−45495), C14orf43 (+27273); chr14:74253266-74253328/C14orf43 (+599); ch
r14:74485423-74485459/ENTPD5 (+585); chr14:74684579-74684656/ALDH6A1 (−133422), VSX2 (−21557); chr
14:74706397-74706940/VSX2 (+494); chr14:74707545-74707572/VSX2 (+1384), ABCD4 (+62208); chr14:7470
7748-74707791/VSX2 (+1595), ABCD4 (+61997); chr14:74892771-74892798/SYNDIG1L (+20); chr14:7496037
5-74960406/NPC2 (−307), ISCA2 (−59); chr14:74981388-74981475/ISCA2 (+20982), LTBP2 (+97602); chr14:75
077821-75077872/LTBP2 (+1187), ISCA2 (+117397); chr14:75078282-75078344/LTBP2 (+721); chr14:750784
64-75078492/LTBP2 (+556); chr14:75079514-75079555/LTBP2 (−501); chr14:75390071-75390106/RPS6KL1
(−901); chr14:75530648-75530703/ACYP1 (+60); chr14:75800460-75800598/JDP2 (−98308), FOS (+55048); chr1
4:75800988-75801052/JDP2 (−97817), FOS (+55539); chr14:75981561-75981708/BATF (−7149), JDP2 (+82798);
chr14:76445825-76445972/TGFB3 (+2193), TTLL5 (+318348); chr14:76449115-76449153/IFT43 (−2962), TG
FB3 (−1042); chr14:76843386-76843732/VASH1 (−384676), ESRRB (+5869); chr14:77192541-77192656/VASH
1 (−35636), ESRRB (+354909); chr14:77279251-77279272/VASH1 (+51027), IRF2BPL (+215772); chr14:77422
842-77422875/IRF2BPL (+72175), VASH1 (+194624); chr14:77495017-77495096/IRF2BPL (−23); chr14:77563
668-77563735/IRF2BPL (−68668), ZDHHC22 (+44432); chr14:77564173-77564235/IRF2BPL (−69170), ZDHHC
22 (+43930); chr14:77600216-77600264/IRF2BPL (−105206), ZDHHC22 (+7894); chr14:77606856-77606921/IR
F2BPL (−111855), ZDHHC22 (+1245); chr14:77736867-77736883/NGB (+780); chr14:77786644-77786699/GST
Z1 (−558), POMT2 (+553); chr14:77965219-77965244/ISM2 (−22); chr14:78083052-78083085/SPTLC2 (+41); c
hr14:78108064-78108264/SPTLC2 (−25054), ALKBH1 (+66192); chr14:78432776-78432795/NRXN3 (−437307),
ADCK1 (+166360); chr14:78447325-78447422/NRXN3 (−422719), ADCK1 (+180948); chr14:85996796-859968
91/FLRT2 (+356); chr14:85997926-85998186/FLRT2 (+1568); chr14:85998575-85998629/FLRT2 (+2114); chr1
4:85999532-85999596/FLRT2 (+3076); chr14:85999730-85999838/FLRT2 (+3296); chr14:88459127-88459170/
GALC (+466); chr14:88790247-88790298/KCNK10 (−680); chr14:90421019-90421129/TDP1 (−1172), EFCAB11
(+15); chr14:90849440-90849476/C14orf102 (−50977), CALM1 (−13869); chr14:90849858-90849897/C14orf102
(−51397), CALM1 (−13449); chr14:91225452-91225508/TTC7B (+57281), CALM1 (+362153); chr14:91287430-
91287542/TTC7B (−4725); chr14:91526648-91526680/RPS6KA5 (+329); chr14:91790478-91790620/GPR68 (−7
9697), CCDC88C (+93639); chr14:91883330-91883379/CCDC88C (+833); chr14:91883497-91883530/CCDC88
C (+674); chr14:91975849-91975897/SMEK1 (+771); chr14:91976332-91976383/SMEK1 (+286); chr14:925062
87-92506361/TRIP11 (+79); chr14:92588261-92588311/NDUFB1 (−133), CPSF2 (−12); chr14:92721338-927214
09/SLC24A4 (−68778), CPSF2 (+133076); chr14:92789945-92789953/SLC24A4 (−203); chr14:92790099-92790
280/SLC24A4 (+38); chr14:92980957-92980986/RIN3 (+847); chr14:93022097-93022189/RIN3 (+42018), LGM
N (+192904); chr14:93260359-93260403/GOLGA5 (−269); chr14:93389458-93389556/CHGA (+62); chr14:9338
9694-93389712/CHGA (+258); chr14:93896686-93896833/COX8C (+83223), PRIMA1 (+358006); chr14:93897
025-93897078/COX8C (+83515), PRIMA1 (+357714); chr14:94253958-94254150/PRIMA1 (+712); chr14:94254
459-94254498/PRIMA1 (+287); chr14:94255284-94255304/PRIMA1 (−528); chr14:94255607-94255669/PRIMA
1 (−872); chr14:94429210-94429343/PRIMA1 (−174511), ASB2 (+13799); chr14:94889871-94889915/SERPINA
1 (−32864), SERPINA11 (+29229); chr14:95234711-95235025/GSC (+1631), SERPINA13 (+127806); chr14:952
35383-95235513/GSC (+1051), SERPINA13 (+128386); chr14:95237643-95237782/GSC (−1214); chr14:95239
349-95239421/GSC (−2886); chr14:95657984-95658142/DICER1 (−49978), CLMN (+128182); chr14:95785544-
95785587/CLMN (+679); chr14:95826752-95826866/CLMN (−40564), C14orf49 (+115364); chr14:96000969-96
001007/GLRX5 (−335); chr14:96180491-96180642/TCL1A (−34); chr14:96180846-96180940/TCL1A (−360); chr1
4:96342310-96342530/C14orf132 (−163241), TCL1A (−161887); chr14:96342631-96342879/C14orf132 (−162906),
TCL1A (−162222); chr14:96343243-96343319/TCL1A (−162748), C14orf132 (−162380); chr14:96343505-9634
3666/TCL1A (−163053), C14orf132 (−162075); chr14:97058818-97058943/VRK1 (−204803), PAPOLA (+90168);
chr14:97059351-97059418/VRK1 (−204299), PAPOLA (+90672); chr14:97093419-97093503/VRK1 (−170223), P
APOLA (+124748); chr14:97499673-97499721/VRK1 (+236013); chr14:97499850-97499970/VRK1 (+236226);
chr14:97685297-97685395/VRK1 (+421662); chr14:98814597-98814691/BCL11B (+923178); chr14:99365922-
99366010/BCL11B (+371856); chr14:99584409-99584475/BCL11B (+153380); chr14:99697645-99697738/BCL
11B (+40130); chr14:99711874-99711967/BCL11B (+25901); chr14:99712087-99712133/BCL11B (+25712); ch
r14:99712245-99712286/BCL11B (+25556); chr14:99712635-99712819/BCL11B (+25095); chr14:99741213-99
741277/BCL11B (−3423); chr14:99947697-99947721/SETD3 (−483), CCNK (−30); chr14:100029881-100030008/
HHIPL1 (−81535), CCNK (+82206); chr14:100069714-100069898/HHIPL1 (−41674), CCNK (+122067); chr14:10
0126367-100126420/CYP46A1 (−24361), HHIPL1 (+14914); chr14:100126546-100126661/CYP46A1 (−24151),
HHIPL1 (+15124); chr14:100142252-100142348/CYP46A1 (−8455), HHIPL1 (+30820); chr14:100192657-10019
2715/EML1 (−67059), CYP46A1 (+41931); chr14:100218129-100218273/EML1 (−41544), CYP46A1 (+67446); c
hr14:100218694-100218710/EML1 (−41043), CYP46A1 (+67947); chr14:100259191-100259328/EML1 (−485); c
hr14:100437950-100438017/EVL (−93767), EML1 (+178239); chr14:100573334-100573426/EVL (+41629), DE
GS2 (+52632); chr14:100704776-100704793/YY1 (−317); chr14:100745092-100745135/SLC25A29 (+27746), Y
Y1 (+40012); chr14:100771141-100771173/SLC25A29 (+1703), YY1 (+66055); chr14:100771535-100771592/S
LC25A29 (+1296), YY1 (+66462); chr14:101012877-101012889/WARS (−170203), BEGAIN (+21524); chr14:10
1033393-101033483/BEGAIN (+969); chr14:101035718-101035730/BEGAIN (−1317); chr14:101069847-10106
9907/DLK1 (−123325), BEGAIN (−35470); chr14:101106694-101106721/DLK1 (−86494), BEGAIN (−72301); chr1
4:101180322-101180399/BEGAIN (−145954), DLK1 (−12841); chr14:101193147-101193345/DLK1 (+44); chr14:
101471994-101472082/DIO3 (−555650), RTL1 (−120854); chr14:101923804-101924029/RTL1 (−572733), DIO3
(−103771); chr14:101924244-101924295/RTL1 (−573086), DIO3 (−103418); chr14:101924438-101924457/RTL1
(−573264), DIO3 (−103240); chr14:101924792-101924857/RTL1 (−573641), DIO3 (−102863); chr14:101925457-1
01925482/RTL1 (−574286), DIO3 (−102218); chr14:101978623-101978672/RTL1 (−627464), DIO3 (−49040); chr
14:102027511-102027540/DIO3 (−162); chr14:102028125-102028144/DIO3 (+447); chr14:102031194-1020312
35/PPP2R5C (−196920), DIO3 (+3527); chr14:102031450-102031507/PPP2R5C (−196656), DIO3 (+3791); chr1
4:102031946-102032003/PPP2R5C (−196160), DIO3 (+4287); chr14:102172148-102172230/PPP2R5C (−55946),
DIO3 (+144501); chr14:102247524-102247551/DYNC1H1 (−183327), PPP2R5C (+19403); chr14:102829204-
102829226/TECPR2 (−85), CINP (+38); chr14:102975568-102975582/RCOR1 (−83421), TECPR2 (+146275); ch
r14:102976068-102976102/RCOR1 (−82911), TECPR2 (+146785); chr14:103058486-103058499/RCOR1 (−503);
chr14:103390033-103390096/AMN (+1072), CDC42BPB (+133677); chr14:103397030-103397068/AMN (+805
6), CDC42BPB (+126693); chr14:103568842-103568967/CDC42BPB (−45163), TNFAIP2 (−23759); chr14:10357
0396-103570455/CDC42BPB (−46684), TNFAIP2 (−22238); chr14:103603371-103603418/EIF5 (−197098), TNFA
IP2 (+10731); chr14:103605108-103605133/EIF5 (−195372), TNFAIP2 (+12457); chr14:103674021-103674032/
EIF5 (−126466), TNFAIP2 (+81363); chr14:103739631-103739754/EIF5 (−60800), TNFAIP2 (+147029); chr14:1
03740437-103740539/EIF5 (−60005), TNFAIP2 (+147824); chr14:103740855-103740890/EIF5 (−59620), TNFAI
P2 (+148209); chr14:103745238-103745292/EIF5 (−55228), TNFAIP2 (+152601); chr14:103745904-103745941/
EIF5 (−54570), TNFAIP2 (+153259); chr14:103746116-103746153/EIF5 (−54358), TNFAIP2 (+153471); chr14:1
03989529-103989537/CKB (−337); chr14:104028792-104028810/BAG5 (−146); chr14:104028958-104028974/B
AG5 (−311); chr14:104095389-104095455/KLC1 (−103); chr14:104096378-104096413/KLC1 (+871); chr14:1041
81581-104181640/ZFYVE21 (−470), XRCC3 (+212); chr14:104181750-104181773/ZFYVE21 (−319), XRCC3 (+6
1); chr14:104313692-104313720/PPP1R13B (+221); chr14:104552184-104552307/ASPG (+223); chr14:104583
036-104583110/KIF26A (−21987), ASPG (+31050); chr14:104601873-104601963/KIF26A (−3142); chr14:10461
6043-104616187/C14orf180 (−429941), KIF26A (+11055); chr14:104730078-104730212/C14orf180 (−315911),
KIF26A (+125085); chr14:104902674-104902726/C14orf180 (−143356), KIF26A (+297640); chr14:105155996-1
05156021/INF2 (+66); chr14:105189927-105189960/ADSSL1 (−6284), INF2 (+34001); chr14:105190853-10519
0900/ADSSL1 (−5351), INF2 (+34934); chr14:105202646-105202739/SIVA1 (−16777), ADSSL1 (+6465); chr14:
105267824-105267900/ZBTB42 (+929); chr14:105310443-105310485/KIAA0284 (−21186), ZBTB42 (+43531); c
hr14:105330940-105330980/KIAA0284 (−690); chr14:105331707-105331744/KIAA0284 (+76); chr14:10534591
3-105346018/PLD4 (−45221), KIAA0284 (+14316); chr14:105359303-105359363/PLD4 (−31854), KIAA0284 (+2
7683); chr14:105393143-105393211/PLD4 (+1990), AHNAK2 (+51517); chr14:105434160-105434286/AHNAK2
(+10471), PLD4 (+43036); chr14:105444634-105444788/AHNAK2 (−17); chr14:105527310-105527383/CDCA4
(−39922), GPR132 (+4407); chr14:105527490-105527543/CDCA4 (−40092), GPR132 (+4237); chr14:10555383
4-105553861/GPR132 (−22094), JAG2 (+81313); chr14:105649183-105649218/NUDT14 (−1541); chr14:105659
520-105659559/BTBD6 (−55339), NUDT14 (−11880); chr14:105714442-105714766/BTBD6 (−275); chr14:10571
4937-105715247/BTBD6 (+213); chr14:105715393-105715538/BTBD6 (+587); chr14:105767979-105768036/B
RF1 (−679); chr14:105780547-105780582/PACS2 (−187); chr14:105781311-105781365/PACS2 (+586); chr14:1
05781580-105781600/PACS2 (+838); chr14:105865018-105865048/TEX22 (+113); chr14:105880953-1058809
79/MTA1 (−5220), TEX22 (+16046); chr14:105888432-105888662/CRIP2 (−52584), MTA1 (+2361); chr14:10590
9329-105909435/CRIP2 (−31749), MTA1 (+23196); chr14:105919368-105919531/CRIP2 (−21681), MTA1 (+332
64); chr14:105930862-105930944/CRIP2 (−10228), MTA1 (+44717); chr14:105944243-105944421/CRIP1 (−892
5), CRIP2 (+3201); chr14:105944568-105944771/CRIP1 (−8587), CRIP2 (+3539); chr14:105952663-105952723/
CRIP1 (−564); chr14:105993486-105993517/TMEM121 (+549); chr14:105994980-105995121/TMEM121 (+209
8), IGHE (+334411); chr14:105995823-105995857/TMEM121 (+2887), IGHE (+333622); chr14:106146364-106
146394/TMEM121 (+153426), IGHE (+183083); chr14:107253106-107253323/ADAM6 (−814857); chr15:205001
81-20500202/HERC2P3 (+211241); chr15:22646691-22646737/GOLGA6L1 (−89532), OR4N3P (+233252); chr1
5:22647239-22647301/GOLGA6L1 (−88976), OR4N3P (+233808); chr15:23115150-23115175/GOLGA8IP (−140
079), NIPA1 (−28727); chr15:23164135-23164158/GOLGA8IP (−91095), NIPA1 (−77711); chr15:26107744-2610
7845/ATP10A (+554); chr15:26108327-26108548/ATP10A (−89); chr15:26327564-26327610/ATP10A (−219238),
GABRB3 (+690636); chr15:27016909-27016944/ATP10A (−908578), GABRB3 (+1296); chr15:27017211-2701
7361/GABRB3 (+937); chr15:27017524-27017586/GABRB3 (+668); chr15:27017947-27018117/GABRB3 (+191);
chr15:27018352-27018470/GABRB3 (−188); chr15:27112123-27112429/GABRA5 (+3); chr15:27112602-2711
2719/GABRA5 (+388); chr15:27112943-27113012/GABRA5 (+705); chr15:27113136-27113215/GABRA5 (+903);
chr15:27113410-27113477/GABRG3 (−102985), GABRA5 (+1171); chr15:27216276-27216304/GABRG3 (−13
9); chr15:27216491-27216830/GABRG3 (+232); chr15:27604124-27604144/GABRG3 (+387705), OCA2 (+7403
24); chr15:28339933-28339954/OCA2 (+4514); chr15:28342116-28342124/OCA2 (+2338); chr15:28342255-28
342521/OCA2 (+2070); chr15:28344188-28344223/OCA2 (+252); chr15:28344350-28344411/OCA2 (+77); chr1
5:28352121-28352152/OCA2 (−7679), HERC2 (+215158); chr15:28352422-28352607/OCA2 (−8057), HERC2
(+214780); chr15:28352737-28352792/OCA2 (−8307), HERC2 (+214530); chr15:28352905-28352957/OCA2 (−84
73), HERC2 (+214364); chr15:28367156-28367210/OCA2 (−22725), HERC2 (+200112); chr15:28648073-28648
379/APBA2 (−565617), HERC2 (−80931); chr15:28700335-28700373/APBA2 (−513489), HERC2 (−133059); chr1
5:29033892-29033933/HERC2 (−466618), APBA2 (−179930); chr15:29034272-29034292/HERC2 (−466987), AP
BA2 (−179561); chr15:29034493-29034565/HERC2 (−467234), APBA2 (−179314); chr15:29077394-29077428/H
ERC2 (−510116), APBA2 (−136432); chr15:29077624-29077646/HERC2 (−510340), APBA2 (−136208); chr15:29
131314-29131356/HERC2 (−564040), APBA2 (−82508); chr15:29131631-29131755/HERC2 (−564398), APBA2
(−82150); chr15:29395858-29396025/NDNL2 (+166078), APBA2 (+182099); chr15:29396215-29396275/NDNL2
(+165775), APBA2 (+182402); chr15:29407814-29407866/NDNL2 (+154180), APBA2 (+193997); chr15:299672
36-29967275/FAM189A1 (−104329), TJP1 (+147450); chr15:29967395-29967587/FAM189A1 (−104564), TJP1
(+147215); chr15:30114303-30114349/TJP1 (+380); chr15:30515184-30515201/TJP1 (−400487), CHRFAM7A
(+170671); chr15:30515409-30515438/TJP1 (−400718), CHRFAM7A (+170440); chr15:30515563-30515630/TJP1
(−400891), CHRFAM7A (+170267); chr15:30517227-30517249/TJP1 (−402532), CHRFAM7A (+168626); chr15:
30517525-30517600/TJP1 (−402857), CHRFAM7A (+168301); chr15:30517994-30518134/TJP1 (−403358), CH
RFAM7A (+167800); chr15:30918971-30919019/ARHGAP11B (+116); chr15:31620491-31620530/KLF13 (+142
8), OTUD7A (+327031); chr15:31620744-31620800/KLF13 (+1689), OTUD7A (+326770); chr15:31727006-317
27135/KLF13 (+107988), OTUD7A (+220471); chr15:31775474-31775483/KLF13 (+156396), OTUD7A (+17206
3); chr15:31775638-31775678/KLF13 (+156575), OTUD7A (+171884); chr15:31775862-31775976/KLF13 (+156
836), OTUD7A (+171623); chr15:31776190-31776278/KLF13 (+157151), OTUD7A (+171308); chr15:32605000-
32605081/ARHGAP11A (−302650), CHRNA7 (+282350); chr15:32605305-32605350/ARHGAP11A (−302363),
CHRNA7 (+282637); chr15:32605490-32605507/ARHGAP11A (−302192), CHRNA7 (+282808); chr15:32607591-
32607849/ARHGAP11A (−299971), CHRNA7 (+285029); chr15:32634605-32634655/ARHGAP11A (−273061),
CHRNA7 (+311939); chr15:33009560-33009613/GREM1 (−618); chr15:33009762-33009821/GREM1 (−413); chr
15:33010676-33010720/GREM1 (+493); chr15:33360261-33360336/FMN1 (−214); chr15:33603609-33603647/
RYR3 (+451); chr15:33603790-33603879/RYR3 (+658); chr15:34630389-34630438/SLC12A6 (−1369); chr15:34
635079-34635126/C15orf55 (−2963), NOP10 (+259); chr15:34728789-34728813/GOLGA8A (−46800), GOLGA8
B (+99421); chr15:34786944-34787232/GOLGA8A (−105087), GOLGA8B (+41134); chr15:34787473-34787585/
GOLGA8A (−105528), GOLGA8B (+40693); chr15:34806445-34806507/GOLGA8A (−124475), GOLGA8B (+21
746); chr15:34874692-34874747/GOLGA8B (−46498), GJD2 (+171969); chr15:35046609-35046689/GJD2 (+40);
chr15:35047149-35047293/GJD2 (−532); chr15:35261632-35261697/AQR (+330); chr15:35965359-35965432/
ZNF770 (−684899); chr15:37172589-37172688/MEIS2 (+220102); chr15:37172792-37172923/MEIS2 (+219883);
chr15:37389363-37389455/MEIS2 (+3332); chr15:37390175-37390198/MEIS2 (+2554); chr15:37390316-373
90339/MEIS2 (+2413); chr15:37393117-37393160/MEIS2 (−398); chr15:37395784-37395913/MEIS2 (−3108); ch
r15:37402546-37402645/TMCO5A (−824862), MEIS2 (−9855); chr15:37403087-37403115/TMCO5A (−824357),
MEIS2 (−10360); chr15:39873303-39873365/THBS1 (+54); chr15:40226253-40226266/EIF2AK4 (−87); chr15:40
400490-40400526/BMF (+567); chr15:40650450-40650479/DISP2 (+31); chr15:40650961-40651001/DISP2 (+5
47); chr15:40660111-40660143/C15orf23 (−14795), DISP2 (+9693); chr15:40675028-40675055/C15orf23 (+120);
chr15:40729185-40729292/BAHD1 (−4172); chr15:41046920-41046991/FAM82A2 (+502); chr15:41047236-4
1047314/FAM82A2 (+183); chr15:41218030-41218093/DLL4 (−3469); chr15:41218220-41218245/DLL4 (−3298);
chr15:41234093-41234122/CHAC1 (−11528), DLL4 (+12577); chr15:41624420-41624463/NUSAP1 (−450), OIP
5 (+377); chr15:41694458-41694512/NDUFAF1 (+173); chr15:41788138-41788173/ITPKA (+2100), LTK (+1792
9); chr15:41793581-41793873/ITPKA (+7671), LTK (+12358); chr15:41794817-41795239/ITPKA (+8972), LTK
(+11057); chr15:41795691-41795714/ITPKA (+9647), LTK (+10382); chr15:41804022-41804115/LTK (+2016), I
TPKA (+18013); chr15:41851447-41851459/TYRO3 (+233); chr15:42264697-42264728/EHD4 (+42); chr15:425
65605-42565650/GANC (−738), TMEM87A (+127); chr15:43415198-43415273/UBR1 (−16950), TMEM62 (−1048
6); chr15:43803760-43803825/TP53BP1 (−18439), MAP1A (−6013); chr15:44084925-44084979/SERF2 (+778);
chr15:45315349-45315418/SORD (+82); chr15:45328132-45328270/SORD (+12899), DUOX2 (+78158); chr15:
45403214-45403337/DUOXA2 (−3247), DUOX2 (+3083); chr15:45403681-45403798/DUOXA2 (−2783), DUOX2
(+2619); chr15:45404000-45404102/DUOXA2 (−2472), DUOX2 (+2308); chr15:45404833-45404897/DUOXA2
(−1658), DUOX2 (+1494); chr15:45409372-45409491/DUOX2 (−3073), DUOXA2 (+2909); chr15:45421681-45421
706/DUOX1 (−498), DUOXA1 (+363); chr15:45421950-45421997/DUOX1 (−218), DUOXA1 (+83); chr15:454273
41-45427369/DUOX1 (+5163), SHF (+66018); chr15:45427720-45427771/DUOX1 (+5554), SHF (+65627); chr1
5:45427913-45428307/DUOX1 (+5918), SHF (+65263); chr15:45670130-45670188/GATM (+821); chr15:45670
839-45670932/GATM (+94); chr15:45694530-45694556/SPATA5L1 (+24); chr15:45996563-45996725/SQRDL
(+69388); chr15:45997063-45997089/SQRDL (+69820); chr15:47476240-47476290/SEMA6D (−534421); chr15:
47476420-47476468/SEMA6D (−534242); chr15:47476806-47476876/SEMA6D (−533845); chr15:47476981-474
77012/SEMA6D (−533689); chr15:47477265-47477354/SEMA6D (−533376); chr15:48470146-48470215/MYEF2
(+377); chr15:48483758-48483906/CTXN2 (−35); chr15:48624362-48624496/DUT (+808); chr15:48937646-489
37709/FBN1 (+307); chr15:50646612-50646641/GABPB1 (+978); chr15:51634151-51634174/CYP19A1 (−3368),
GLDN (+450); chr15:51973695-51973763/SCG3 (+179); chr15:52264427-52264479/LEO1 (−495); chr15:5247
1661-52471816/BCL2L10 (−66767), GNB5 (+11826); chr15:52546480-52546599/GNB5 (−62975), MYO5C (+414
55); chr15:53072801-53072851/ARPP19 (−211613), ONECUT1 (+9383); chr15:53075660-53075739/ARPP19
(−214487), ONECUT1 (+6509); chr15:53075865-53075985/ARPP19 (−214712), ONECUT1 (+6284); chr15:53077
001-53077065/ARPP19 (−215820), ONECUT1 (+5176); chr15:53079678-53079717/ARPP19 (−218485), ONECU
T1 (+2511); chr15:53079892-53079970/ARPP19 (−218718), ONECUT1 (+2278); chr15:53080620-53080736/AR
PP19 (−219465), ONECUT1 (+1531); chr15:53080991-53081054/ARPP19 (−219810), ONECUT1 (+1186); chr15:
53081297-53081398/ONECUT1 (+861); chr15:53082021-53082144/ONECUT1 (+126); chr15:53083043-53083
116/ONECUT1 (−871); chr15:53083485-53083653/ONECUT1 (−1360); chr15:53086967-53087075/ONECUT1
(−4812); chr15:53087376-53087451/ONECUT1 (−5205); chr15:53090272-53090305/ONECUT1 (−8080); chr15:53
093151-53093342/ONECUT1 (−11038); chr15:53097907-53098381/ONECUT1 (−15935); chr15:55581873-5558
1886/PIGB (−29253), RAB27A (−18773); chr15:55880783-55880890/PYGO1 (+213); chr15:56034723-56034885/
PRTG (+373); chr15:56035260-56035304/PRTG (−105); chr15:58357402-58357799/ALDH1A2 (+520); chr15:5
8358473-58358503/ALDH1A2 (−367); chr15:59042071-59042128/ADAM10 (+77); chr15:59397038-59397082/C
CNB2 (−224); chr15:59949123-59949186/GTF2A2 (+582); chr15:59949616-59949696/GTF2A2 (+81); chr15:602
87586-60287643/BNIP2 (−305973), FOXB1 (−8806); chr15:60296632-60296860/FOXB1 (+325); chr15:6029782
7-60297941/FOXB1 (+1463), ANXA2 (+392301); chr15:61520555-61520576/RORA (−600837), VPS13C (+8320
98); chr15:61521294-61521311/RORA (−601574), VPS13C (+831361); chr15:61521621-61521656/RORA (−601
910), VPS13C (+831025); chr15:62360146-62360177/C2CD4A (+986); chr15:62456966-62457008/C2CD4B
(+495); chr15:63673604-63673652/CA12 (+447); chr15:63893466-63893529/USP3 (+96688), HERC1 (+232649);
chr15:64125910-64125924/HERC1 (+230); chr15:64454945-64455005/PPIB (+379); chr15:65067395-6506744
5/RBPMS2 (+350); chr15:65116156-65116216/RBPMS2 (−48416), PIF1 (+1652); chr15:65133693-65133806/A
NKDD1A (−70351), PIF1 (−15912); chr15:65341696-65341754/OSTBETA (+4017), RASL12 (+18663); chr15:653
60293-65360323/RASL12 (+80); chr15:65370301-65370340/KBTBD13 (+1167), PDCD7 (+55853); chr15:65370
516-65370564/KBTBD13 (+1386), PDCD7 (+55634); chr15:65477608-65477663/CLPX (−73); chr15:65648100-6
5648136/PARP16 (−69100), IGDCC3 (+22260); chr15:65689099-65689348/IGDCC3 (−18846), IGDCC4 (+26186);
chr15:65715493-65715513/IGDCC4 (−93); chr15:66585667-66585725/DIS3L (−224); chr15:66648575-666486
23/TIPIN (+455); chr15:66914719-66914742/SMAD6 (−79943), LCTL (−56896); chr15:67055825-67055897/SMA
D3 (−302334), SMAD6 (+61187); chr15:67135023-67135059/SMAD3 (−223154), SMAD6 (+140367); chr15:6732
5908-67325991/SMAD3 (−32245), SMAD6 (+331276); chr15:67357533-67357544/SMAD3 (−656); chr15:673583
53-67358377/SMAD3 (+170); chr15:67834900-67834962/MAP2K5 (−90); chr15:68111967-68112086/SKOR1
(−5914), MAP2K5 (+277006); chr15:68112227-68112276/SKOR1 (−5689), MAP2K5 (+277231); chr15:68112440-6
8112498/SKOR1 (−5472), MAP2K5 (+277448); chr15:68118876-68118929/SKOR1 (+962); chr15:68119428-681
19455/PIAS1 (−227130), SKOR1 (+1501); chr15:68120358-68120630/PIAS1 (−226078), SKOR1 (+2553); chr15:
68120959-68121149/PIAS1 (−225518), SKOR1 (+3113); chr15:68121958-68122286/PIAS1 (−224450), SKOR1
(+4181); chr15:68122405-68122457/PIAS1 (−224141), SKOR1 (+4490); chr15:68724442-68724480/ITGA11 (+3
1); chr15:68851469-68851534/ITGA11 (−127010), CORO2B (−57377); chr15:68869973-68870013/ITGA11 (−145
501), CORO2B (−38886); chr15:69087721-69087781/ANP32A (+25510), CORO2B (+178872); chr15:69111702-
69111754/ANP32A (+1533), CORO2B (+202849); chr15:69706455-69706516/KIF23 (−141); chr15:70641356-70
641447/TLE3 (−251146), UACA (+414448); chr15:71146313-71146345/LARP6 (+169); chr15:71407483-714075
37/THSD4 (−26278), LRRC49 (+222582); chr15:72766579-72766608/ARIH1 (−73); chr15:72922664-72922725/B
BS4 (−55825), ARIH1 (+156028); chr15:72978450-72978506/BBS4 (−42); chr15:73660327-73660446/HCN4 (+1
218), NEO1 (+315562); chr15:73660724-73660793/HCN4 (+846); chr15:73925010-73925058/NPTN (+719); chr
15:74044450-74044487/TBC1D21 (−121499), CD276 (+67847); chr15:74045023-74045074/TBC1D21 (−120919),
CD276 (+68427); chr15:74134497-74134581/TBC1D21 (−31429), CD276 (+157917); chr15:74219213-742192
93/LOXL1 (+464); chr15:74284537-74284589/PML (−2451), STOML1 (+72); chr15:74421954-74421979/ISLR2
(−776); chr15:74425566-74426180/ISLR (−41032), ISLR2 (+3130); chr15:74426304-74426762/ISLR (−40372), IS
LR2 (+3790); chr15:74426956-74427056/ISLR (−39899), ISLR2 (+4263); chr15:74428683-74428716/ISLR (−382
05), ISLR2 (+5957); chr15:74429616-74429721/ISLR (−37236), ISLR2 (+6926); chr15:74658397-74658501/CYP
11A1 (+1632), CCDC33 (+129782); chr15:74725503-74725548/SEMA7A (+773); chr15:74988350-74988381/E
DC3 (+20); chr15:75018265-75018311/CYP1A1 (−411); chr15:75251414-75251478/RPP25 (−1671); chr15:7547
0911-75471217/DNM1P34 (+124242), PPCDC (+155137); chr15:75640496-75640520/NEIL1 (+1177), MAN2C1
(+20433); chr15:75660927-75660967/MAN2C1 (−6); chr15:75743154-75743204/SIN3A (+747); chr15:7574747
6-75747524/SIN3A (−3574); chr15:75939641-75939671/SNX33 (−1692); chr15:76351998-76352038/C15orf27
(−281); chr15:76627537-76627575/ISL2 (−1591); chr15:76630125-76630513/ISL2 (+1172), SCAPER (+545898); c
hr15:76632146-76632517/ISL2 (+3185), SCAPER (+543885); chr15:76633170-76633206/ISL2 (+4041), SCAPE
R (+543029); chr15:76633985-76634013/ISL2 (+4852), SCAPER (+542218); chr15:76634812-76634842/ISL2
(+5680), SCAPER (+541390); chr15:76635168-76635504/ISL2 (+6189), SCAPER (+540881); chr15:76638571-7
6638609/ISL2 (+9443), SCAPER (+537627); chr15:76639545-76639720/ISL2 (+10486), SCAPER (+536584); c
hr15:77197619-77197683/RCN2 (−26311), SCAPER (−21434); chr15:77288814-77288855/PSTPIP1 (+1370), T
SPAN3 (+74735); chr15:78111120-78111195/LINGO1 (−186449), TBC1D2B (+258836); chr15:78111869-78111
916/LINGO1 (−187184), TBC1D2B (+258101); chr15:78591578-78591643/WDR61 (+329); chr15:78632669-786
32683/CRABP1 (+10); chr15:78730795-78730830/IREB2 (+295); chr15:78730945-78730984/IREB2 (+447); chr
15:78912372-78912441/CHRNA3 (+1230), CHRNA5 (+54545); chr15:78913028-78913094/CHRNA3 (+576); ch
r15:78913470-78913480/CHRNA3 (+162); chr15:79123257-79123337/MORF4L1 (−41875), ADAMTS7 (−19524);
chr15:79237097-79237144/CTSH (+299); chr15:79381746-79382098/CTSH (−144502), RASGRF1 (+1293); chr
15:79383384-79383438/RASGRF1 (−196); chr15:79724120-79724351/KIAA1024 (−622); chr15:79724561-7972
4606/KIAA1024 (−274); chr15:79724793-79724863/KIAA1024 (−30); chr15:80189019-80189066/MTHFS (+348);
chr15:80189531-80189549/MTHFS (−149); chr15:80445425-80445463/FAH (+211); chr15:80544336-80544364/
ARNT2 (−152342), FAH (+99117); chr15:81426601-81426681/MESDC2 (−144436), IL16 (−90999); chr15:82337
728-82337802/MEX3B (+596); chr15:82555204-82555281/EFTUD1 (−139); chr15:83315614-83315638/RPS17L
(−106418), CPEB1 (+1102); chr15:83315990-83316231/CPEB1 (+617); chr15:83348845-83348912/CPEB1 (−32
151), AP3B2 (+29756); chr15:83349612-83349671/CPEB1 (−32914), AP3B2 (+28993); chr15:83775849-837758
90/TM6SF1 (−454); chr15:83776002-83776022/TM6SF1 (−312); chr15:83776138-83776157/TM6SF1 (−176); chr
15:83776307-83776332/TM6SF1 (−4); chr15:83776717-83776768/TM6SF1 (+419); chr15:83777020-83777097/
TM6SF1 (+735); chr15:83875666-83875705/HDGFRP3 (+635); chr15:83876083-83876201/HDGFRP3 (+179); c
hr15:83876483-83876654/HDGFRP3 (−248); chr15:83952124-83952768/HDGFRP3 (−76125), BNC1 (+1022); c
hr15:83953117-83953303/BNC1 (+258); chr15:83953410-83953486/BNC1 (+20); chr15:84115854-84115931/S
H3GL3 (−198); chr15:84116339-84116377/SH3GL3 (+267); chr15:84116553-84116651/SH3GL3 (+511); chr15:
84116764-84116828/SH3GL3 (+705); chr15:84322322-84322367/ADAMTSL3 (−493); chr15:84322860-8432288
3/ADAMTSL3 (+34); chr15:84323261-84323372/ADAMTSL3 (+479); chr15:84748620-84748678/ZSCAN2 (−395
600), ADAMTSL3 (+425811); chr15:85144626-85144641/ZSCAN2 (+385); chr15:85201465-85201502/NMB (+3
18); chr15:85360718-85360760/ALPK3 (+828); chr15:85923271-85923324/AKAP13 (−573); chr15:85923546-85
923617/AKAP13 (−289); chr15:86337720-86337757/KLHL25 (+450); chr15:88798321-88798364/NTRK3 (+1619);
chr15:88798654-88798724/NTRK3 (+1273); chr15:88798989-88799036/NTRK3 (+949); chr15:88800302-888
00412/NTRK3 (−395); chr15:88801009-88801088/NTRK3 (−1087); chr15:89147680-89147722/DET1 (−57789), A
EN (−16826); chr15:89312771-89312794/ACAN (−33891), ISG20 (+130744); chr15:89313061-89313078/ACAN
(−33604), ISG20 (+131031); chr15:89346327-89346346/ACAN (−337); chr15:89346794-89346881/ACAN (+164);
chr15:89631117-89631175/ABHD2 (−235); chr15:89877857-89877872/POLG (+161); chr15:89914041-8991413
5/POLG (−36062), RHCG (+125711); chr15:89914450-89914866/POLG (−36632), RHCG (+125141); chr15:8992
0706-89920968/POLG (−42811), RHCG (+118962); chr15:89921112-89921167/POLG (−43114), RHCG (+11865
9); chr15:89922226-89922323/POLG (−44249), RHCG (+117524); chr15:89943775-89943816/POLG (−65770),
RHCG (+96003); chr15:89949410-89949616/POLG (−71487), RHCG (+90286); chr15:89950897-89950961/POL
G (−72903), RHCG (+88870); chr15:89951377-89951465/POLG (−73395), RHCG (+88378); chr15:89952453-89
952563/POLG (−74482), RHCG (+87291); chr15:89956354-89956422/POLG (−78362), RHCG (+83411); chr15:8
9973850-89973912/POLG (−95855), RHCG (+65918); chr15:90118614-90118695/C15orf42 (−163); chr15:90197
992-90198066/KIF7 (+653); chr15:90294070-90294092/MESP1 (+459); chr15:90320013-90320089/MESP2 (+4
62); chr15:90357590-90357681/ANPEP (+436); chr15:90358060-90358102/ANPEP (−9); chr15:90358482-9035
8536/ANPEP (−437); chr15:90745210-90745254/SEMA4B (+670); chr15:90774476-90774544/C15orf58 (−2977),
CIB1 (+2769); chr15:90931324-90931437/IQGAP1 (−92); chr15:91478168-91478242/HDDC3 (−2431), UNC45A
(−10); chr15:92937654-92937696/ST8SIA2 (+535); chr15:92938061-92938122/ST8SIA2 (+952); chr15:9293829
4-92938315/ST8SIA2 (+1165), FAM174B (+260726); chr15:93277268-93277366/CHD2 (−166234), FAM174B
(−78286); chr15:93592315-93592359/RGMA (+24879), CHD2 (+148786); chr15:93616379-93616396/RGMA (+82
8); chr15:93616893-93616958/RGMA (+290); chr15:93631396-93631632/RGMA (−14298); chr15:93823455-938
23555/RGMA (−206289); chr15:96596276-96596317/NR2F2 (−277814); chr15:96877328-96877631/NR2F2 (+33
69); chr15:96884911-96884955/NR2F2 (+10822); chr15:96902737-96902957/NR2F2 (+28736); chr15:9690945
4-96909526/NR2F2 (+35379); chr15:96911692-96911763/NR2F2 (+37617); chr15:96912815-96912957/NR2F2
(+38775); chr15:96951691-96951731/NR2F2 (+77600); chr15:96953099-96953131/NR2F2 (+79004); chr15:969
59549-96959719/NR2F2 (+85523); chr15:96959961-96960189/NR2F2 (+85964); chr15:98503555-98503609/A
RRDC4 (−351); chr15:98503877-98503946/ARRDC4 (−21); chr15:99190403-99190462/IGF1R (−2328); chr15:99
191024-99191091/IGF1R (−1703); chr15:99191726-99191748/IGF1R (−1024); chr15:99601915-99601980/PGP
EP1L (−53063), SYNM (−43338); chr15:99602250-99602275/PGPEP1L (−53378), SYNM (−43023); chr15:996406
97-99640745/SYNM (−4565); chr15:99993063-99993116/TTC23 (−203275), MEF2A (−113043); chr15:10034673
6-100346749/LYSMD4 (−73117), ADAMTS17 (+535440); chr15:100523267-100523359/LYSMD4 (−249687), AD
AMTS17 (+358870); chr15:100524300-100524410/LYSMD4 (−250729), ADAMTS17 (+357828); chr15:1008826
21-100882681/ADAMTS17 (−468); chr15:100913596-100914039/ADAMTS17 (−31635), CERS3 (+171107); chr1
5:101142231-101142301/ASB7 (−489); chr15:101319326-101319426/ALDH1A3 (−100633), ASB7 (+176621); ch
r15:101419261-101419292/ALDH1A3 (−732); chr15:101420384-101420425/ALDH1A3 (+396); chr15:101420665-
101420734/ALDH1A3 (+691); chr15:101420860-101420971/ALDH1A3 (+907); chr15:101513366-101513700/L
RRK1 (+54073), CHSY1 (+278604); chr15:101514020-101514085/LRRK1 (+54593), CHSY1 (+278084); chr15:
101662478-101662585/CHSY1 (+129605), LRRK1 (+203072); chr15:101991885-101991946/SNRPA1 (−156456),
PCSK6 (+38271); chr15:102036977-102037061/PCSK6 (−6832), TM2D3 (+155575); chr15:102192517-10219
2543/TM2D3 (+64); chr15:102264298-102264338/TARSL2 (+327); chr15:102285731-102285762/OR4F6 (−6017
6), TARSL2 (−21102); chr15:102286360-102286450/OR4F6 (−59518), TARSL2 (−21760); chr16:103714-103749/
POLR3K (−100), SNRNP25 (−97); chr16:204442-204480/HBM (−11512), HBZ (+1607); chr16:215873-215912/HB
M (−80); chr16:216447-216505/HBM (+503); chr16:230450-230496/HBQ1 (+140); chr16:285606-285643/ITFG3
(+824); chr16:374816-374858/AXIN1 (+27839), PDIA2 (+42222); chr16:375198-375306/AXIN1 (+27424), PDIA
2 (+42637); chr16:420585-420714/MRPL28 (−81); chr16:596925-596963/PIGQ (−23024), SOLH (+19088); chr16:
610316-610343/PIGQ (−9638), SOLH (+32474); chr16:616826-616856/PIGQ (−3127); chr16:729642-729700/ST
UB1 (−444); chr16:776949-777020/HAGHL (−281); chr16:838230-838262/CHTF18 (−376), RPUSD1 (+137); chr1
6:880232-880330/GNG13 (−29548), LMF1 (+140703); chr16:881319-881414/GNG13 (−30634), LMF1 (+139617);
chr16:1021077-1021119/LMF1 (−114); chr16:1030271-1030443/SOX8 (−1451); chr16:1030886-1030920/SOX8
(−905); chr16:1032621-1032660/SOX8 (+833); chr16:1115679-1115884/SSTR5 (−6974), SOX8 (+83974); chr16:
1122947-1123001/SSTR5 (+218); chr16:1202433-1202546/CACNA1H (−751); chr16:1203109-1203151/CACN
A1H (−111); chr16:1203784-1203807/CACNA1H (+555); chr16:1203963-1204002/CACNA1H (+742); chr16:120
4111-1204128/CACNA1H (+879); chr16:1295083-1295106/TPSD1 (−11178), TPSAB1 (+4417); chr16:1383986-
1384020/BAIAP3 (−502); chr16:1429455-1429495/GNPTG (+27575), UNKL (+35230); chr16:1464133-1464197/
UNKL (+540); chr16:1464400-1464441/UNKL (+284); chr16:1832093-1832161/NUBP2 (−806), SPSB3 (+454); c
hr16:1877289-1877332/HAGH (−116), FAHD1 (+86); chr16:1922305-1922421/C16orf73 (−184); chr16:2009771-
2009877/NDUFB10 (+307); chr16:2010101-2010163/NDUFB10 (+615); chr16:2014592-2014613/RNF151 (−227
2), RPS2 (+224); chr16:2029706-2029783/GFER (−4405), NOXO1 (+1695); chr16:2040961-2040980/SYNGR3
(+1025), ZNF598 (+18792); chr16:2041513-2041581/SYNGR3 (+1601), ZNF598 (+18216); chr16:2042599-2042
617/SYNGR3 (+2662), ZNF598 (+17155); chr16:2058088-2058242/ZNF598 (+1598), SYNGR3 (+18219); chr16:
2058908-2058953/ZNF598 (+832); chr16:2070108-2070147/NPW (+607); chr16:2228878-2229056/CASKIN1
(+17498), TRAF7 (+23168); chr16:2246321-2246394/CASKIN1 (+107); chr16:2255453-2255473/MLST8 (+285); c
hr16:2255672-2255773/MLST8 (+545); chr16:2256686-2256819/MLST8 (+1575), C16orf79 (+4316); chr16:228
2243-2282326/DNASE1L2 (−4183); chr16:2286867-2286954/DNASE1L2 (+443); chr16:2287176-2287230/DNA
SE1L2 (+735); chr16:2317567-2317602/RNPS1 (+273); chr16:2317714-2317877/RNPS1 (+62); chr16:2391719-
2391769/ABCA3 (−997); chr16:2392043-2392126/ABCA3 (−1338); chr16:2509928-2509956/NTN3 (−11558), CC
NF (+30547); chr16:2523639-2523707/TBC1D24 (−1474); chr16:2557412-2557487/ATP6V0C (−6277), TBC1D2
4 (+32303); chr16:2587853-2587880/PDPK1 (−103); chr16:2892603-2892626/PRSS30P (−142); chr16:2892797-
2892911/PRSS30P (−381); chr16:2902857-2902886/PRSS30P (−10399), PRSS22 (+5299); chr16:2933591-293
3612/FLYWCH2 (+406); chr16:2954365-2954428/FLYWCH1 (−7583), FLYWCH2 (+21201); chr16:3011021-301
1149/KREMEN2 (−3132); chr16:3016539-3016646/PAQR4 (−2749); chr16:3016850-3017156/PAQR4 (−2339); ch
r16:3017435-3017733/PAQR4 (−1758); chr16:3030667-3030710/PKMYT1 (−149); chr16:3078150-3078252/HCF
C1R1 (−3914); chr16:3096789-3096821/MMP25 (+123); chr16:3156802-3156830/ZSCAN10 (−13955), ZNF205
(−5747); chr16:3174434-3174491/ZNF213 (−10594), ZNF205 (+11900); chr16:3184826-3184880/ZNF213 (−204);
chr16:3209374-3209411/OR1F1 (−44854), CASP14L (+15173); chr16:3220287-3220438/OR1F1 (−33884), CAS
P14L (+26143); chr16:3220557-3220590/OR1F1 (−33673), CASP14L (+26354); chr16:3220893-3221141/OR1F
1 (−33230), CASP14L (+26797); chr16:3221701-3221786/OR1F1 (−32503), CASP14L (+27524); chr16:3233017-
3233198/OR1F1 (−21139), CASP14L (+38888); chr16:3233331-3233434/OR1F1 (−20864), CASP14L (+39163);
chr16:3234104-3234164/OR1F1 (−20113), CASP14L (+39914); chr16:3355234-3355250/ZNF75A (−191), TIGD7
(+197); chr16:3508054-3508088/NAA60 (+79); chr16:3508197-3508211/NAA60 (+212); chr16:3550079-35501
17/CLUAP1 (−865); chr16:3630428-3630517/NLRC3 (−3081); chr16:3929428-3929483/CREBBP (+665); chr16:4
165376-4165448/ADCY9 (+774); chr16:4234348-4234380/ADCY9 (−68178), SRL (+57717); chr16:4290102-429
0219/ADCY9 (−123975), SRL (+1920); chr16:4343850-4343938/GLIS2 (−38322), TFAP4 (−20893); chr16:436640
5-4366415/TFAP4 (−43409), GLIS2 (−15806); chr16:4377508-4377552/GLIS2 (−4686); chr16:4524583-4524619/
HMOX2 (−1740), NMRAL1 (+295); chr16:4588089-4588308/C16orf5 (+617); chr16:4744272-4744315/NUDT16L
1 (+600); chr16:4956642-4956744/PPL (+30443), UBN1 (+58781); chr16:5290747-5290791/ALG1 (+168959); c
hr16:5540579-5540672/ALG1 (+418816); chr16:6068927-6068936/ALG1 (+947122); chr16:6069056-6069094/A
LG1 (+947265); chr16:6069197-6069249/ALG1 (+947413); chr16:6069552-6069577/ALG1 (+947755); chr16:60
69685-6069940/ALG1 (+948003); chr16:6070454-6070542/ALG1 (+948688); chr16:6533295-6533425/RBFOX1
(−849391); chr16:6533898-6533913/RBFOX1 (−848845); chr16:6623776-6623842/RBFOX1 (−758942); chr16:7
353408-7353471/RBFOX1 (−29311); chr16:7354040-7354077/RBFOX1 (−28692); chr16:7354658-7354699/RBF
OX1 (−28072); chr16:9185071-9185102/USP7 (−127746); chr16:10277051-10277071/GRIN2A (−798); chr16:109
12268-10912299/FAM18A (+337); chr16:10912434-10912508/FAM18A (+150); chr16:11036128-11036153/CIIT
A (+65086), SOCS1 (+313898); chr16:11038164-11038215/CIITA (+67135), SOCS1 (+311849); chr16:1132701
5-11327283/SOCS1 (+22890), CIITA (+356094); chr16:11367141-11367181/TNP2 (−4001), PRM3 (+291); chr1
6:11439091-11439156/RMI2 (−187); chr16:11680895-11680924/LITAF (−104); chr16:11761822-11761887/SNN
(−434); chr16:11836628-11836647/TXNDC11 (+10); chr16:12009160-12009187/GSPT1 (+651); chr16:1299583
9-12996045/SHISA9 (+465); chr16:14164966-14165019/MKL2 (−203); chr16:14397594-14397850/MKL2 (+2325
26), PARN (+326406); chr16:14403370-14403424/MKL2 (+238201), PARN (+320731); chr16:14727058-147271
08/PARN (−2955), BFAR (+415); chr16:15736811-15736851/KIAA0430 (+192); chr16:16043421-16043536/ABC
C1 (+45); chr16:18495902-18495920/NPIP (−29200), NOMO2 (+77523); chr16:18573469-18573483/NOMO2 (−4
2); chr16:18801430-18801501/RPS15A (+190); chr16:19125225-19125250/ITPRIPL2 (−16); chr16:19144569-19
144698/SYT17 (−35004), ITPRIPL2 (+19380); chr16:20084899-20085303/GPR139 (−1); chr16:20817738-20817
786/LOC81691 (−5), ERI2 (+33); chr16:21170020-21170037/TMEM159 (+117), DNAH3 (+733); chr16:21171001-
21171083/DNAH3 (−280); chr16:21289708-21289749/CRYM (+24675), ANKS4B (+44713); chr16:21295296-21
295340/CRYM (+19086), ANKS4B (+50302); chr16:22201759-22201819/EEF2K (−15803), VWA3A (+97926); ch
r16:2244851 7-22448554/CDR2 (−62598), LOC641298 (−14352); chr16:22825077-22825157/HS3ST2 (−743); chr
16:22825814-22825859/HS3ST2 (−23); chr16:22826351-22826438/HS3ST2 (+535); chr16:23313739-23313779/
SCNN1B (+168); chr16:23568473-23568509/EARS2 (+205); chr16:23706287-23706411/PLK1 (+16148), ERN2
(+18472); chr16:23847054-23847310/PRKCB (−118); chr16:23847680-23847757/PRKCB (+419); chr16:238478
75-23847933/PRKCB (+604); chr16:24266746-24266883/CACNG3 (−59); chr16:24267145-24267220/CACNG3
(+309); chr16:24267753-24267789/CACNG3 (+897); chr16:25704264-25704389/HS3ST4 (+980); chr16:272487
20-27248786/NSMCE1 (+31360), JMJD5 (+33457); chr16:27330114-27330232/IL21R (−108406), IL4R (+4922);
chr16:28073839-28073881/GSG1L (+970); chr16:28074042-28074076/GSG1L (+771); chr16:28074255-28074
417/GSG1L (+494); chr16:28074937-28074955/GSG1L (−116); chr16:28379194-28379218/NPIPL1 (−11231), EI
F3C (+35959); chr16:28385610-28385625/NPIPL1 (−17643), EIF3C (+29547); chr16:28503421-28503478/APO
BR (−2520), CLN3 (+173); chr16:28634328-28634470/NPIPL1 (−21511), SULT1A1 (−13750); chr16:28634894-28
635014/NPIPL1 (−20956), SULT1A1 (−14305); chr16:28834044-28834071/ATXN2L (−356); chr16:28834645-288
34663/ATXN2L (+240); chr16:28874233-28874319/SH2B1 (−802); chr16:28936466-28936529/RABEP2 (+34); c
hr16:28961897-28961970/NFATC2IP (−384); chr16:29086226-29086270/LAT (+90101), NPIPL1 (+329561); chr
16:29093574-29093610/LAT (+97445), NPIPL1 (+322217); chr16:29160249-29160325/LAT (+164140), NPIPL1
(+255522); chr16:29675784-29675990/QPRT (−14554), SPN (+1587); chr16:29816674-29816729/MAZ (−1153);
chr16:29823163-29823214/C16orf53 (−4339), PRRT2 (−220); chr16:29887709-29888476/CDIPT (−13515), SEZ
6L2 (+22492); chr16:30134733-30134772/MAPK3 (−123); chr16:30195526-30195626/CORO1A (+845); chr16:3
0381770-30381809/MYLPF (−4333), TBC1D10B (−268); chr16:30389275-30389336/ZNF48 (−327); chr16:30418
815-30418861/ZNF771 (+103); chr16:30429006-30429060/ZNF771 (+10298), DCTPP1 (+12340); chr16:30485
052-30485158/ITGAL (+1122), ZNF768 (+52805); chr16:30537854-30537878/ZNF768 (+44); chr16:30545993-3
0546036/ZNF747 (+179); chr16:30569336-30569365/ZNF764 (+291); chr16:30572842-30572913/ZNF764 (−323
6); chr16:30621067-30621123/ZNF689 (+587); chr16:30709858-30709893/SRCAP (−586); chr16:30933680-309
33709/FBXL19 (−2201); chr16:30960370-30960419/ORAI3 (−10); chr16:31075680-31075726/ZNF668 (+706); ch
r16:31105659-31105726/VKORC1 (+583); chr16:31191980-31192018/FUS (+568); chr16:31368514-31368596/I
TGAD (−36078), ITGAX (+2046); chr16:31439105-31439159/COX6A2 (+617); chr16:31488049-31488297/SLC5
A2 (−6266), TGFB1I1 (+4697); chr16:31488851-31488906/SLC5A2 (−5560), TGFB1I1 (+5403); chr16:31549095-
31549116/ZNF720 (−175460), AHSP (+9903); chr16:31580164-31580310/ZNF720 (−144329), AHSP (+41034); c
hr16:31830729-31830775/ZNF267 (−54327), ZNF720 (+106186); chr16:31830938-31830978/ZNF267 (−54121),
ZNF720 (+106392); chr16:33612367-33612502/BC068290 (−172076), TP53TG3B (+350315); chr16:33853363-
33853421/BC068290 (+68881); chr16:34489903-34489976/BC068290 (+705429); chr16:46404949-46404995/
SHCBP1 (+250339); chr16:46722678-46722717/ORC6 (−860), VPS35 (+446); chr16:46722844-46722962/ORC
6 (−655), VPS35 (+241); chr16:46865329-46865365/MYLK3 (−83126), GPT2 (−52961); chr16:48089277-480893
31/ABCC12 (+91377), PHKB (+594094); chr16:48643923-48643948/N4BP1 (+184); chr16:48844508-48845119/
N4BP1 (−200694), CBLN1 (+470928); chr16:49311990-49312032/N4BP1 (−667891), CBLN1 (+3731); chr16:49
314822-49314959/CBLN1 (+851); chr16:49316387-49316408/CBLN1 (−656); chr16:49316776-49316844/CBLN
1 (−1068); chr16:49475481-49475626/CBLN1 (−159812), ZNF423 (+385364); chr16:49732566-49732622/CBLN
1 (−416852), ZNF423 (+128324); chr16:49872512-49872806/TMEM188 (−186530), ZNF423 (−11741); chr16:498
89634-49889658/TMEM188 (−169543), ZNF423 (−28728); chr16:49891406-49891452/TMEM188 (−167760), ZN
F423 (−30511); chr16:50187923-50187941/ADCY7 (−133891), PAPD5 (+1103); chr16:50308403-50308533/ADC
Y7 (−13355), PAPD5 (+121639); chr16:50715180-50715218/SNX20 (+65); chr16:50875168-50875194/CYLD
(+99220), SALL1 (+310002); chr16:51168338-51168641/SALL1 (+16693), CYLD (+392529); chr16:51169000-511
69034/SALL1 (+16166), CYLD (+393056); chr16:51183362-51183494/SALL1 (+1755), CYLD (+407467); chr16:
51183720-51183963/SALL1 (+1341), CYLD (+407881); chr16:51184431-51184601/SALL1 (+667); chr16:51184
958-51185054/SALL1 (+177); chr16:51185292-51185458/SALL1 (−192); chr16:51185965-51186025/SALL1 (−81
2); chr16:51187592-51187695/SALL1 (−2461); chr16:51188610-51188696/SALL1 (−3470); chr16:51189208-511
89282/SALL1 (−4062); chr16:51190038-51190121/SALL1 (−4897); chr16:51219359-51219444/SALL1 (−34219);
chr16:52581505-52581537/TOX3 (−715); chr16:53165591-53165634/RBL2 (−302738), CHD9 (+76668); chr16:5
4315986-54316061/IRX3 (+4354), FTO (+578149); chr16:54317947-54317988/IRX3 (+2410), FTO (+580093); c
hr16:54318589-54318621/IRX3 (+1773), FTO (+580730); chr16:54318765-54318853/IRX3 (+1569), FTO (+580
934); chr16:54321819-54321907/IRX3 (−1485); chr16:54322298-54322447/IRX3 (−1995); chr16:54322937-5432
3012/IRX3 (−2597); chr16:54323354-54323509/IRX3 (−3054); chr16:54324293-54324442/IRX3 (−3990); chr16:5
4324593-54324636/IRX3 (−4237); chr16:54611696-54611724/IRX5 (−353401), IRX3 (−291332); chr16:54966169-
54966659/IRX6 (−392057), IRX5 (+1303); chr16:54967265-54967414/IRX6 (−391131), IRX5 (+2229); chr16:549
67667-54967702/IRX6 (−390786), IRX5 (+2574); chr16:54969399-54969548/IRX6 (−388997), IRX5 (+4363); chr
16:54970258-54970357/IRX6 (−388163), IRX5 (+5197); chr16:54971058-54971116/IRX6 (−387384), IRX5 (+597
6); chr16:54971566-54971721/IRX6 (−386827), IRX5 (+6533); chr16:54972300-54972349/IRX6 (−386146), IRX5
(+7214); chr16:55357573-55357611/IRX6 (−879); chr16:55357941-55357991/IRX6 (−505); chr16:55358416-553
58565/IRX6 (+20); chr16:55358676-55358784/IRX6 (+259); chr16:55361546-55361674/MMP2 (−151471), IRX6
(+3139); chr16:55362773-55362962/MMP2 (−150213), IRX6 (+4397); chr16:55365219-55365434/MMP2 (−1477
54), IRX6 (+6856); chr16:55512763-55512935/MMP2 (−232); chr16:55513364-55513482/MMP2 (+342); chr16:5
5689778-55689852/SLC6A2 (−741); chr16:55690380-55690453/SLC6A2 (−139); chr16:55690577-55690761/SL
C6A2 (+113); chr16:56224833-56224880/GNAO1 (−394); chr16:56228426-56228515/GNAO1 (+3220), AMFR
(+230973); chr16:56651124-56651238/MT1E (−8404), MT2A (+8703); chr16:56669270-56669605/MT1A (−3140);
chr16:56672173-56672221/MT1A (−381); chr16:56672386-56672513/MT1A (−128); chr16:56681916-56681953/
MT1B (−3876); chr16:56691837-56691884/MT1F (+6); chr16:56696747-56696833/MT1F (+4935), MT1G (+5187);
chr16:56703399-56703438/MT1G (−1442); chr16:56703560-56703621/MT1G (−1614); chr16:56709893-56709
949/MT1IP (+272); chr16:56764407-56764444/NUP93 (+409); chr16:56966468-56966496/HERPUD1 (+734); c
hr16:57278806-57278842/ARL2BP (−214); chr16:57318708-57318783/PLLP (−162); chr16:57480752-57480792/
COQ9 (−565), CIAPIN1 (+597); chr16:57509861-57509966/DOK4 (+10471), POLR2C (+13363); chr16:5766348
0-57663574/GPR97 (−38630), GPR56 (+9617); chr16:57836101-57836154/KIFC3 (+311); chr16:58060578-580
60638/MMP15 (+1326), C16orf80 (+102688); chr16:58129262-58129359/C16orf80 (+33985), MMP15 (+70029);
chr16:58231265-58231297/CSNK2A2 (+501); chr16:58497033-58497060/NDRG4 (−502); chr16:58497336-584
97469/NDRG4 (−146); chr16:58550114-58550163/SETD6 (+756); chr16:58663370-58663426/CNOT1 (+352); c
hr16:62069084-62069136/CDH8 (+1629); chr16:62069274-62069336/CDH8 (+1434); chr16:62070113-6207024
5/CDH8 (+560); chr16:63651555-63651574/NONE; chr16:65156895-65156939/CDH11 (−998); chr16:65157838-
65157863/CDH11 (−1932); chr16:66461384-66461511/BEAN1 (+248); chr16:66462133-66462187/BEAN1 (+96
0); chr16:66613126-66613221/CMTM2 (−177); chr16:66638222-66638268/CMTM3 (+17); chr16:66967866-6696
7928/CES2 (−450), FAM96B (+423); chr16:66982614-66982672/CES3 (−12489), CES2 (+14296); chr16:669829
38-66983018/CES3 (−12154), CES2 (+14631); chr16:67184057-67184120/B3GNT9 (+813), BC007896 (+970);
chr16:67199591-67199959/NOL3 (−7990), HSF4 (+2487); chr16:67218695-67218723/EXOC3L1 (+5398), NOL3
(+10944); chr16:67428252-67428323/TPPP3 (−867); chr16:67428539-67428701/TPPP3 (−1199); chr16:674289
11-67429022/TPPP3 (−1546); chr16:67450547-67450605/ZDHHC1 (−237); chr16:67464824-67464885/HSD11B
2 (−181); chr16:67555194-67555233/AGRP (−37498), FAM65A (−8326); chr16:67562690-67562705/FAM65A (−8
42); chr16:67564267-67564312/FAM65A (+750); chr16:67596724-67596765/CTCF (+435); chr16:67693788-67
693831/PARD6A (−1041), ACD (+908); chr16:67753011-67753048/GFOD2 (+243); chr16:67840677-67840711/
TSNAXIP1 (−316), RANBP10 (−139); chr16:67867576-67867632/THAP11 (−8609), TSNAXIP1 (+26594); chr16:6
7927573-67927637/PSKH1 (+430); chr16:68057773-68057842/DDX28 (−38), DUS2L (+604); chr16:68118645-6
8118725/NFATC3 (−584); chr16:68269885-68269896/ESRP2 (+245); chr16:68270008-68270022/ESRP2 (+121);
chr16:68390172-68390251/PRMT7 (+45335), SMPD3 (+92197); chr16:68481817-68481955/SMPD3 (+523); c
hr16:68676605-68676841/CDH3 (−1428); chr16:68679344-68679362/CDH1 (−91842), CDH3 (+1202); chr16:691
41662-69141722/HAS3 (+2225), CHTF8 (+24379); chr16:69166371-69166402/CHTF8 (−316), CIRH1A (−112), C
HTF8 (+106); chr16:69363753-69363787/PDF (+728); chr16:69788907-69788961/NOB1 (−105); chr16:7041581
8-70415853/ST3GAL2 (+57155), DDX19B (+82764); chr16:70731068-70731182/MTSS1L (−11171), VAC14 (+1
03936); chr16:70771496-70771548/MTSS1L (−51568), VAC14 (+63539); chr16:71459745-71459956/ZNF23 (+3
6266), CALB2 (+67235); chr16:71460089-71460270/ZNF23 (+35937), CALB2 (+67564); chr16:71475549-7147
5587/ZNF23 (+20549), CALB2 (+82952); chr16:71518306-7158342/ZNF23 (−22207), ZNF19 (+4930); chr16:71
757620-71757692/PHLPP2 (−8952), AP1G1 (+85320); chr16:71918277-71918302/ZNF821 (−197); chr16:71918
445-71918540/ZNF821 (−400); chr16:72698163-72698208/PMFBP1 (−492122), ZFHX3 (+384088); chr16:72698
763-72698838/PMFBP1 (−492737), ZFHX3 (+383473); chr16:72821149-72821299/PMFBP1 (−615160), ZFHX3
(+261050); chr16:73091885-73091900/ZFHX3 (−9619); chr16:73097300-73097376/ZFHX3 (−15064); chr16:7309
9020-73099107/ZFHX3 (−16790); chr16:73099971-73100271/ZFHX3 (−17847); chr16:73100402-73100475/ZFH
X3 (−18165); chr16:73517084-73517220/PSMD7 (−813521), ZFHX3 (−434878); chr16:74440563-74440617/CLE
C18B (+14778), NPIPL2 (+28719); chr16:74440806-74440820/CLEC18B (+14555), NPIPL2 (+28942); chr16:75
033530-75033560/ZNRF1 (+630); chr16:75284183-75284222/CTRB2 (−43131), BCAR1 (+15702); chr16:75284
546-75284629/CTRB2 (−43516), BCAR1 (+15317); chr16:75284869-75284892/CTRB2 (−43809), BCAR1 (+1502
4); chr16:75285389-75285434/CTRB2 (−44340), BCAR1 (+14493); chr16:75528869-75528922/CHST6 (+30); ch
r16:75600154-75600172/GABARAPL2 (−86); chr16:77468681-77468738/ADAMTS18 (+301); chr16:77468860-7
7468969/ADAMTS18 (+96); chr16:77821872-77821903/VAT1L (−595); chr16:79200997-79201089/MAF (+4335
79); chr16:79425535-79425559/MAF (+209075); chr16:79623617-79623797/MAF (+10915); chr16:79632817-7
9633073/MAF (+1677); chr16:79633577-79633613/MAF (+1027); chr16:79804558-79804596/DYNLRB2 (−7702
77), MAF (−169955); chr16:80837354-80837395/CDYL2 (+800); chr16:81069601-81069622/ATMIN (+154); chr1
6:81110503-81110546/GCSH (+19455), ATMIN (+41067); chr16:81348308-81348354/GAN (−240); chr16:82203
449-82203521/MPHOSPH6 (+344); chr16:82661412-82661468/CDH13 (+1041); chr16:84002792-84002810/NE
CAB2 (+564); chr16:84029506-84029596/NECAB2 (+27314), SLC38A8 (+46211); chr16:84262294-84262348/K
CNG4 (+11035), ADAD2 (+37598); chr16:85116423-85116476/KIAA0182 (−530474), KIAA0513 (+55040); chr16:
85138764-85138903/KIAA0182 (−508090), KIAA0513 (+77424); chr16:85171053-85171121/KIAA0182 (−47583
7), KIAA0513 (+109677); chr16:85286283-85286371/KIAA0182 (−360597), KIAA0513 (+224917); chr16:852926
89-85292791/KIAA0182 (−354184), KIAA0513 (+231330); chr16:85337153-85337243/KIAA0182 (−309726), KIA
A0513 (+275788); chr16:85343228-85343355/KIAA0182 (−303632), KIAA0513 (+281882); chr16:85344435-853
44570/KIAA0182 (−302421), KIAA0513 (+283093); chr16:85427513-85427587/KIAA0182 (−219374), KIAA0513
(+366140); chr16:85436749-85436840/KIAA0182 (−210129), KIAA0513 (+375385); chr16:85482379-85482436/K
IAA0182 (−164516), KIAA0513 (+420998); chr16:85600958-85601085/KIAA0182 (−45902), KIAA0513 (+539612);
chr16:85648095-85648236/KIAA0182 (+1242), GINS2 (+74422); chr16:85648543-85648641/KIAA0182 (+166
8), GINS2 (+73996); chr16:85648893-85648998/KIAA0182 (+2022), GINS2 (+73642); chr16:85783751-857838
23/GINS2 (−61199), COX4NB (+49361); chr16:85792866-85793032/GINS2 (−70361), COX4NB (+40199); chr16:
86103612-86103759/FOXF1 (−440447), IRF8 (+170912); chr16:86439293-86439368/FOXF1 (−104802), IRF8
(+506557); chr16:86528384-86528735/FOXF1 (−15573), IRF8 (+595786); chr16:86529610-86529704/FOXF1 (−14
476), IRF8 (+596883); chr16:86530445-86530505/FOXF1 (−13658), IRF8 (+597701); chr16:86530805-8653082
0/FOXF1 (−13320), IRF8 (+598039); chr16:86530993-86531016/FOXF1 (−13128), IRF8 (+598231); chr16:86531
289-86531374/FOXF1 (−12801), IRF8 (+598558); chr16:86531481-86531527/FOXF1 (−12629), IRF8 (+598730);
chr16:86531656-86531701/FOXF1 (−12454), IRF8 (+598905); chr16:86531990-86532038/FOXF1 (−12119), IR
F8 (+599240); chr16:86532213-86532408/FOXF1 (−11822), IRF8 (+599537); chr16:86535992-86536131/FOXF
1 (−8071), IRF8 (+603288); chr16:86538778-86538820/FOXF1 (−5334), IRF8 (+606025); chr16:86539427-86539
463/FOXF1 (−4688); chr16:86542239-86542273/FOXF1 (−1877); chr16:86544558-86544734/FOXF1 (+513); chr
16:86544858-86545059/FOXF1 (+826); chr16:86546627-86546697/FOXF1 (+2529), MTHFSD (+42179); chr16:
86548828-86548905/FOXF1 (+4734), MTHFSD (+39974); chr16:86549125-86549135/FOXF1 (+4997), MTHFS
D (+39711); chr16:86549275-86549345/FOXF1 (+5177), MTHFSD (+39531); chr16:86549556-86549624/FOXF
1 (+5457), MTHFSD (+39251); chr16:86550291-86550488/FOXF1 (+6257), MTHFSD (+38451); chr16:8659938
5-86599480/FOXC2 (−1424); chr16:86601817-86602037/FOXL1 (−10188), FOXC2 (+1070); chr16:86612283-86
612455/FOXL1 (+254); chr16:86612596-86612664/FOXL1 (+515); chr16:86612800-86613152/FOXL1 (+861); c
hr16:86766748-86766775/FOXL1 (+154647), FBXO31 (+650632); chr16:86962681-86962712/FOXL1 (+350582),
FBXO31 (+454697); chr16:86962860-86963004/FOXL1 (+350817), FBXO31 (+454462); chr16:86968306-869
68372/FOXL1 (+356224), FBXO31 (+449055); chr16:86990271-86990363/FOXL1 (+378202), FBXO31 (+42707
7); chr16:87050635-87050759/FBXO31 (+366697), FOXL1 (+438582); chr16:87086848-87087028/FBXO31 (+3
30456), FOXL1 (+474823); chr16:87270133-87270247/FBXO31 (+147204), FOXL1 (+658075); chr16:87416712-
87416735/FBXO31 (+670); chr16:87635971-87636008/JPH3 (−509); chr16:87855415-87855489/SLC7A5 (+47
648), JPH3 (+218953); chr16:87902805-87902820/SLC7A5 (+287); chr16:87993363-87993423/ZNF469 (−5004
86), BANP (+8355); chr16:88367324-88367364/ZNF469 (−126535), BANP (+382306); chr16:88496611-8849679
0/ZFPM1 (−23313), ZNF469 (+2822); chr16:88497136-88497180/ZFPM1 (−22856), ZNF469 (+3279); chr16:885
18785-88518836/ZFPM1 (−1203); chr16:88589780-88589844/ZC3H18 (−46977), ZFPM1 (+69798); chr16:88600
503-88600511/ZC3H18 (−36282), ZFPM1 (+80493); chr16:88600797-88600888/ZC3H18 (−35946), ZFPM1 (+80
829); chr16:88616918-88617012/ZC3H18 (−19824), ZFPM1 (+96951); chr16:88700512-88700602/IL17C (−4444);
chr16:88701003-88701343/IL17C (−3828); chr16:88752975-88753000/SNAI3 (−106); chr16:88758478-887586
17/SNAI3 (−5666), RNF166 (+14281); chr16:88767227-88767316/SNAI3 (−14390), RNF166 (+5557); chr16:887
69900-88769941/CTU2 (−2970), RNF166 (+2908); chr16:88812307-88812357/PIEZO1 (+39040), CTU2 (+3944
1); chr16:88844844-88844922/PIEZO1 (+6489), CTU2 (+71992); chr16:88851294-88851348/PIEZO1 (+51); chr
16:88858514-88858660/CDT1 (−11599), PIEZO1 (−7215); chr16:88866383-88866456/CDT1 (−3766); chr16:8886
8608-88868734/CDT1 (−1515); chr16:88870300-88870350/CDT1 (+139); chr16:89003086-89003234/PABPN1L
(−70092), CBFA2T3 (+40344); chr16:89033863-89034075/PABPN1L (−100901), CBFA2T3 (+9535); chr16:8904
1912-89041964/PABPN1L (−108870), CBFA2T3 (+1566); chr16:89042315-89042383/PABPN1L (−109281), CBF
A2T3 (+1155); chr16:89043373-89043441/CBFA2T3 (+97); chr16:89044515-89044613/CBFA2T3 (−1060); chr1
6:89044779-89045001/CBFA2T3 (−1386); chr16:89261143-89261212/SLC22A31 (+5351), CDH15 (+23015); ch
r16:89267825-89267957/SLC22A31 (−1362); chr16:89268992-89269013/SLC22A31 (−2474); chr16:89573472-8
9573585/SPG7 (−1276); chr16:89641355-89641413/CPNE7 (−792); chr16:89642529-89642560/CPNE7 (+369);
chr16:89642797-89642823/CPNE7 (+634); chr16:89642929-89643017/CPNE7 (+797); chr16:89767931-897679
57/CDK10 (+14868), C16orf7 (+19450); chr16:89768197-89768247/CDK10 (+15146), C16orf7 (+19172); chr16:
89787087-89787112/ZNF276 (−852), C16orf7 (+294); chr16:89789245-89789327/C16orf7 (−1892), ZNF276 (+1
334); chr16:89940943-89941004/TCF25 (+980); chr16:90038552-90038590/CENPBD1 (+669); chr16:90039469-
90039503/AFG3L1P (−4600), CENPBD1 (−246); chr16:90075578-90075667/DBNDD1 (+906); chr16:90086047-
90086126/GAS8 (−2921); chr16:90143643-90143696/PRDM7 (−1332); chr17:29890-29994/DOC2B (+1478); chr
17:234746-234795/RPH3AL (−32138), VPS53 (+383325); chr17:260456-260521/RPH3AL (−57856), VPS53 (+35
7607); chr17:617958-617979/VPS53 (+127); chr17:635936-635959/FAM57A (+101); chr17:655517-655539/GE
MIN4 (−27); chr17:655770-655880/GEMIN4 (−324); chr17:882873-882912/NXN (+105); chr17:883526-883582/N
XN (−556); chr17:943269-943307/TIMM22 (+42931), ABR (+139843); chr17:943548-943617/TIMM22 (+43226),
ABR (+139548); chr17:1012417-1012469/ABR (+70688), TIMM22 (+112086); chr17:1083469-1083490/ABR (−3
49); chr17:1107066-1107143/BHLHA9 (−66753), ABR (−23974); chr17:1131336-1131423/ABR (−48249), BHLHA
9 (−42478); chr17:1132838-1132870/ABR (−49723), BHLHA9 (−41004); chr17:1133673-1133707/ABR (−50559),
BHLHA9 (−40168); chr17:1160228-1160270/ABR (−77118), BHLHA9 (−13609); chr17:1173888-1174238/BHLHA
9 (+205); chr17:1174362-1174384/BHLHA9 (+515); chr17:1320785-1320857/YWHAE (−17265), CRK (+38740);
chr17:1394663-1394817/CRK (−35179), MYO1C (+1261); chr17:1465561-1465586/PITPNA (+536); chr17:1532
765-1532798/SLC43A2 (−652); chr17:1552698-1552881/SCARF1 (−3749), RILP (+602); chr17:1588019-158804
2/PRPF8 (+145); chr17:1901789-1901813/RTN4RL1 (+26377), RPA1 (+168528); chr17:1956749-1956782/HIC
1 (−2838); chr17:1960007-1960123/HIC1 (+461); chr17:1960235-1960585/HIC1 (+806); chr17:1960748-196085
9/HIC1 (+1200), SMG6 (+246265); chr17:1960965-1961018/HIC1 (+1388), SMG6 (+246077); chr17:1962099-1
962301/HIC1 (+2596), SMG6 (+244869); chr17:2297309-2297378/MNT (+6914), SGSM2 (+56538); chr17:2305
636-2305725/MNT (−1423); chr17:2414944-2414999/METTL16 (+228); chr17:2615137-2615185/KIAA0664 (−23
4); chr17:2696047-2696094/RAP1GAP2 (−3661); chr17:2700621-2700780/RAP1GAP2 (+969); chr17:2756166-
2756268/RAP1GAP2 (+56485), OR1D5 (+210684); chr17:2838933-2838975/OR1D5 (+127947), RAP1GAP2
(+139222); chr17:2839143-2839192/OR1D5 (+127733), RAP1GAP2 (+139436); chr17:3432284-3432404/TRPV3
(+28945), ASPA (+53048); chr17:3438938-3439029/TRPV3 (+22305), ASPA (+59688); chr17:3571977-357200
1/TMEM93 (−101), TAX1BP3 (−16); chr17:3572709-3572751/TAX1BP3 (−757), TMEM93 (+640); chr17:3599173-
3599244/P2RX5 (+489); chr17:3795639-3795684/CAMKK1 (−1625); chr17:3814784-3814830/CAMKK1 (−20770),
P2RX1 (+5153); chr17:3819195-3819242/P2RX1 (+741); chr17:3819373-3819418/P2RX1 (+564); chr17:3908
130-3908185/ATP2A3 (−40400), ZZEF1 (+138095); chr17:4607042-4607098/PELP1 (+562); chr17:4641833-464
1953/ZMYND15 (−1426), CXCL16 (+1330); chr17:4642311-4642483/ZMYND15 (−922), CXCL16 (+826); chr17:4
651566-4651662/TM4SF5 (−23573), ZMYND15 (+8295); chr17:4693074-4693142/VMO1 (−3379), BC150535
(+520), GLTPD2 (+854); chr17:4803687-4803928/CHRNE (+2561), MINK1 (+67173); chr17:4804078-4804151/C
HRNE (+2254), MINK1 (+67480); chr17:4804291-4804398/CHRNE (+2024), MINK1 (+67710); chr17:4843752-4
843820/SLC25A11 (−324), RNF167 (+156); chr17:4981822-4981951/ZFP3 (+133); chr17:5000936-5000963/ZF
P3 (+19196), ZNF232 (+25447); chr17:5014939-5014988/ZNF232 (+11433), ZFP3 (+33210); chr17:5015130-50
15185/ZNF232 (+11239), ZFP3 (+33404); chr17:5019663-5019737/ZNF232 (+6697), ZFP3 (+37946); chr17:502
6108-5026146/ZNF232 (+270); chr17:5323389-5323426/NUP88 (−349), RPAIN (+447); chr17:5342594-5342656/
C1QBP (−154); chr17:5404091-5404222/MIS12 (+13910), NLRP1 (+83675); chr17:5487163-5487267/NLRP1
(+617); chr17:5783108-5783181/NLRP1 (−295313), WSCD1 (−190789); chr17:5800913-5801043/NLRP1 (−31314
6), WSCD1 (−172956); chr17:5974246-5974297/WSCD1 (+338); chr17:6459775-6459791/PITPNM3 (+94); chr1
7:6543203-6543260/TXNDC17 (−990); chr17:6543466-6543492/TXNDC17 (−743), KIAA0753 (+768); chr17:654
3665-6543736/TXNDC17 (−521), KIAA0753 (+546); chr17:6555437-6555465/MED31 (−497); chr17:6617174-661
7299/SLC13A5 (−497); chr17:6899127-6899161/ALOX12 (−240); chr17:6918146-6918167/C17orf49 (+693); chr
17:6925693-6925723/BCL6B (−661); chr17:6926155-6926198/BCL6B (−192); chr17:6939243-6939269/SLC16A
13 (−138); chr17:6945623-6945647/SLC16A11 (+1607), SLC16A13 (+6241); chr17:6946153-6946175/SLC16A1
1 (+1078), SLC16A13 (+6770); chr17:6946412-6946476/SLC16A11 (+798); chr17:7077705-7077743/ASGR2
(−59594), ASGR1 (+5159); chr17:7080953-7080980/ASGR2 (−62837), ASGR1 (+1916); chr17:7081187-7081226/
ASGR2 (−63077), ASGR1 (+1676); chr17:7138009-7138077/DVL2 (−180); chr17:7146515-7146549/PHF23 (−37
07), GABARAP (−779); chr17:7165130-7165155/CLDN7 (+1121), C17orf81 (+9592); chr17:7165468-7165695/C
LDN7 (+682); chr17:7166306-7166376/CLDN7 (−77); chr17:7197555-7197579/YBX2 (+309); chr17:7240012-72
40098/ACAP1 (+207); chr17:7240479-7240548/ACAP1 (+666); chr17:7287256-7287270/TNK1 (+2970), PLSCR
3 (+10899); chr17:7287422-7287591/TNK1 (+3214), PLSCR3 (+10655); chr17:7308851-7308875/NLGN2 (−263
9), C17orf61 (−1413); chr17:7339523-7339568/FGF11 (−3143), TMEM102 (+784); chr17:7341503-7341649/FGF
11 (−1113); chr17:7341756-7341822/FGF11 (−900); chr17:7350323-7350400/SLC35G6 (−34359), CHRNB1 (+19
56); chr17:7387531-7387572/POLR2A (−146), ZBTB4 (+16); chr17:7464690-7464723/SENP3 (−602); chr17:760
8421-7608435/EFNB3 (−92); chr17:7608576-7608613/EFNB3 (+75); chr17:7620295-7620334/DNAH2 (−2724); c
hr17:7759289-7759320/CYB5D1 (−1759), TMEM88 (+921); chr17:7761162-7761197/LSMD1 (−8), CYB5D1 (+11
6); chr17:7919772-7919806/ALOX15B (−22569), GUCY2D (+13801); chr17:7942673-7942759/ALOX15B (+358);
chr17:7975744-7975774/ALOX12B (+15262), ALOX15B (+33401); chr17:8024155-8024224/ALOXE3 (−1956);
chr17:8054550-8054696/HES7 (−27213), PER1 (+1130); chr17:8066433-8066510/VAMP2 (−179); chr17:806661
8-8066691/VAMP2 (−362); chr17:8077105-8077137/VAMP2 (−10828), TMEM107 (+2593); chr17:8113719-8113
757/AURKB (+145); chr17:8126467-8126524/AURKB (−12613), CTC1 (+24917); chr17:8150444-8150617/PFAS
(−2065), CTC1 (+882); chr17:8286405-8286496/RPL26 (+114); chr17:8339889-8339943/NDEL1 (+737); chr17:
8868668-8868814/NTN1 (−56118), PIK3R5 (−52907); chr17:8905284-8905384/PIK3R5 (−89500), NTN1 (−19525);
chr17:8905692-8905738/PIK3R5 (−89881), NTN1 (−19144); chr17:8907728-8907776/PIK3R5 (−91918), NTN1
(−17107); chr17:8926539-8926561/NTN1 (+1691), STX8 (+552725); chr17:8926674-8926703/NTN1 (+1830), ST
X8 (+552586); chr17:8926866-8926902/NTN1 (+2025), STX8 (+552391); chr17:9135925-9136059/NTN1 (+211
133), STX8 (+343283); chr17:9143296-9143376/NTN1 (+218477), STX8 (+335939); chr17:9143537-9143607/N
TN1 (+218713), STX8 (+335703); chr17:9143790-9143835/NTN1 (+218954), STX8 (+335462); chr17:9479147-
9479185/WDR16 (−778), STX8 (+109); chr17:10101110-10101131/GAS7 (+747); chr17:11145314-11145389/S
HISA6 (+612); chr17:11924527-11924610/MAP2K4 (+434); chr17:12325239-12325342/MYOCD (−243916), MA
P2K4 (+401156); chr17:12877138-12877185/ELAC2 (+44219), ARHGAP44 (+184333); chr17:12877320-12877
536/ELAC2 (+43953), ARHGAP44 (+184599); chr17:13503945-13504194/ELAC2 (−582689), HS3ST3A1 (+117
4); chr17:13504959-13505001/HS3ST3A1 (+264); chr17:14200907-14200930/HS3ST3B1 (−3587); chr17:14212
521-14212551/HS3ST3B1 (+8030), PMP22 (+951557); chr17:15244852-15244987/TEKT3 (+38); chr17:158207
46-15820777/ADORA2B (−27469), MEIS3P1 (+130598); chr17:15821184-15821210/ADORA2B (−27034), MEIS
3P1 (+131033); chr17:15847757-15847779/ADORA2B (−463); chr17:16283927-16283956/UBB (−425); chr17:16
395319-16395341/C17orf76-AS1 (+53029), ZNF287 (+77190); chr17:16570118-16570208/ZNF624 (−12996), K
RT16P2 (+165984); chr17:16570319-16570360/ZNF624 (−13173), KRT16P2 (+165807); chr17:16777281-16777
334/KRT16P2 (−41161), TNFRSF13B (+98094); chr17:16945967-16945999/MPRIP (−121991), TNFRSF13B (−7
0581); chr17:17170247-17170300/FLCN (−29772), COPS3 (+14343); chr17:17287225-17287254/MED9 (−93060),
NT5M (+80560); chr17:17295540-17295618/MED9 (−84721), NT5M (+88899); chr17:17380175-17380216/ME
D9 (−104); chr17:17586304-17586321/RAI1 (+1526), SREBF1 (+154012); chr17:17627993-17628109/RAI1 (+43
264), SREBF1 (+112274); chr17:17628219-17628267/RAI1 (+43456), SREBF1 (+112082); chr17:17661380-17
661447/RAI1 (+76627), SREBF1 (+78911); chr17:17696385-17696447/SREBF1 (+43909), RAI1 (+111629); chr
17:17942433-17942477/ATPAF2 (+25); chr17:17943318-17943340/ATPAF2 (−849); chr17:18086258-18086312/
ALKBH5 (−582); chr17:18129033-18129064/LLGL1 (+113); chr17:18163909-18163935/FLII (−1867), SMCR7
(−502); chr17:18528494-18528534/TBC1D28 (+19226), LGALS9C (+148415); chr17:18538360-18538454/TBC1D
28 (+9333), LGALS9C (+158308); chr17:19318728-19318847/SLC47A1 (−118379), RNF112 (+4297); chr17:195
51783-19551819/ALDH3A2 (−263); chr17:20747026-20747060/USP22 (+199309), CDRT15L2 (+264006); chr17:
20747179-20747201/USP22 (+199162), CDRT15L2 (+264153); chr17:20805955-20806021/USP22 (+140364),
CDRT15L2 (+322951); chr17:20944215-20944282/USP22 (+2103), CDRT15L2 (+461212); chr17:21002662-21
002711/USP22 (−56335), DHRS7B (−27554); chr17:21156941-21156994/TMEM11 (−39060), MAP2K3 (−31000);
chr17:21367075-21367188/MTRNR2L1 (−655305), KCNJ18 (+58684); chr17:21367373-21367445/MTRNR2L1
(−655028), KCNJ18 (+58961); chr17:21414858-21414967/MTRNR2L1 (−607524), KCNJ18 (+106465); chr17:214
15453-21415476/MTRNR2L1 (−606972), KCNJ18 (+107017); chr17:21455042-21455071/MTRNR2L1 (−567380),
KCNJ18 (+146609); chr17:25676094-25676480/KSR1 (−122749), WSB1 (+55181); chr17:25680982-25681023/
KSR1 (−118033), WSB1 (+59897); chr17:25793823-25793905/KSR1 (−5172), WSB1 (+172758); chr17:2612085
1-26120901/NOS2 (+6679), LGALS9 (+162702); chr17:26220327-26220401/NLK (−149324), NOS2 (−92809); ch
r17:26368591-26368637/NLK (−1074); chr17:26554297-26554487/KRT18P55 (+80016), NLK (+184704); chr17:
26554753-26554791/KRT18P55 (+79636), NLK (+185084); chr17:26634268-26634287/KRT18P55 (+130); chr1
7:26662300-26662339/TNFAIP1 (−228), IFT20 (+175); chr17:26684172-26684228/TMEM199 (−487), POLDIP2
(+403); chr17:26699303-26699404/VTN (−1981), SARM1 (+367); chr17:26711815-26711874/SARM1 (+12858),
SLC46A1 (+21385); chr17:26879358-26879389/UNC119 (+272); chr17:26903871-26903937/ALDOC (+47); chr
17:26926026-26926083/SPAG5 (+1); chr17:26988721-26988761/SUPT6H (−561), SDF2 (+449); chr17:2703878
5-27038892/PROCA1 (+33); chr17:27044220-27044250/RPL23A (−2765), RAB34 (+1051); chr17:27044419-270
44581/RPL23A (−2500), RAB34 (+786); chr17:27044744-27044880/RPL23A (−2188), RAB34 (+474); chr17:270
47400-27047431/RAB34 (−2130), RPL23A (+416); chr17:27053584-27053634/NEK8 (−2223), TLCD1 (−379); chr
17:27054041-27054063/NEK8 (−1780), TLCD1 (−822); chr17:27071281-27071309/TRAF4 (+272); chr17:272768
74-27276903/DHRS13 (−46800), PHF12 (+1619); chr17:27503598-27503625/TIAF1 (−100985), MYO18A (+379
5); chr17:27893195-27893344/TP53I13 (−2469), ABHD15 (+772); chr17:27918568-27918605/GIT1 (−1977); chr
17:27940476-27940590/GIT1 (−23923), CORO6 (+7908); chr17:27943723-27943891/GIT1 (−27197), CORO6
(+4634); chr17:27950128-27950259/CORO6 (−1753); chr17:28087998-28088056/CORO6 (−139586), SSH2 (+168
991); chr17:28565435-28565637/SLC6A4 (−2582); chr17:28927103-28927146/LRRC37BP1 (−8323), TBC1D29
(+41083); chr17:28927613-28927624/LRRC37BP1 (−7829), TBC1D29 (+41577); chr17:29249287-29249457/AD
AP2 (+618); chr17:29249961-29250019/RNF135 (−47966), ADAP2 (+1236); chr17:29335759-29335853/NF1 (−8
6139), RNF135 (+37850); chr17:29336075-29336123/NF1 (−85846), RNF135 (+38143); chr17:29421883-29421
899/NF1 (−54); chr17:29719247-29719289/RAB11FIP4 (+626); chr17:29908330-29908396/RAB11FIP4 (+18972
1), C17orf79 (+277963); chr17:30186463-30186515/C17orf79 (−163); chr17:30244357-30244382/SUZ12 (−1967
4), UTP6 (−15641); chr17:30334007-30334083/LRRC37B (−14110), SUZ12 (+70001); chr17:30669062-3066908
2/C17orf75 (+156); chr17:32482483-32482665/ACCN1 (+1251); chr17:32906556-32906598/TMEM132E (−1191);
chr17:32907805-32907873/TMEM132E (+71); chr17:32908147-32908170/TMEM132E (+391); chr17:3295321
9-32953234/TMEM132E (+45459), CCT6B (+335301); chr17:32953728-32953966/TMEM132E (+46079), CCT6
B (+334681); chr17:32964650-32964755/TMEM132E (+56935), CCT6B (+323825); chr17:33446674-33446704/
RFFL (−55930), NLE1 (+22633); chr17:33641110-33641148/SLFN11 (+59591), SLFN5 (+71043); chr17:336727
04-33672794/SLFN11 (+27971), SLFN5 (+102663); chr17:33776355-33776394/SLFN13 (−519); chr17:3413656
5-34136717/TAF15 (+153); chr17:34842884-34842918/ZNHIT3 (+428); chr17:34900456-34900490/GGNBP2
(−264); chr17:34997819-34998007/LHX1 (−296859), MRM1 (+39888); chr17:34998131-34998163/LHX1 (−296625),
MRM1 (+40122); chr17:35291899-35291920/LHX1 (−2862); chr17:35299511-35299546/AATF (−6646), LHX1
(+4757); chr17:35300073-35300150/AATF (−6063), LHX1 (+5340); chr17:35300713-35300812/AATF (−5412), LH
X1 (+5991); chr17:35306151-35306167/AATF (−16); chr17:35766530-35766573/TADA2A (−425), ACACA (+350);
chr17:36104035-36104217/HNF1B (+970); chr17:36104551-36104643/HNF1B (+499); chr17:36105350-36105
458/HNF1B (−308); chr17:36582015-36582204/ARHGAP23 (−2610); chr17:36610236-36610293/ARHGAP23
(+25545), SRCIN1 (+151918); chr17:36666142-36666336/ARHGAP23 (+81519), SRCIN1 (+95944); chr17:36666
447-36666692/ARHGAP23 (+81850), SRCIN1 (+95613); chr17:36666831-36666991/ARHGAP23 (+82191), SR
CIN1 (+95272); chr17:36714490-36714528/SRCIN1 (+47674), ARHGAP23 (+129789); chr17:36717793-367179
25/SRCIN1 (+44324), ARHGAP23 (+133139); chr17:36718096-36718255/SRCIN1 (+44007), ARHGAP23 (+133
456); chr17:36718495-36718567/SRCIN1 (+43652), ARHGAP23 (+133811); chr17:36719377-36719422/SRCIN
1 (+42783), ARHGAP23 (+134680); chr17:36734989-36735009/SRCIN1 (+27184), ARHGAP23 (+150279); chr1
7:36762342-36762362/SRCIN1 (−169); chr17:36829692-36829779/SRCIN1 (−67553), MLLT6 (−32137); chr17:36
862067-36862089/MLLT6 (+205); chr17:36981169-36981216/PIP4K2B (−25035), RPL23 (+28860); chr17:37009
590-37009648/RPL23 (+434); chr17:37307514-37307531/PLXDC1 (+379); chr17:37308034-37308156/PLXDC1
(−193); chr17:37321625-37321787/ARL5C (+708); chr17:37381430-37381570/STAC2 (+540); chr17:37381727-
37381825/STAC2 (+264); chr17:37557180-37557248/FBXL20 (+695); chr17:37558000-37558008/FBXL20 (−95);
chr17:37607607-37607662/MED1 (−108); chr17:37729643-37729715/NEUROD2 (+34496), CDK12 (+111940);
chr17:37729909-37729927/NEUROD2 (+34257), CDK12 (+112179); chr17:37752939-37753021/NEUROD2
(+11195), CDK12 (+135241); chr17:37764138-37764263/NEUROD2 (−26); chr17:37894915-37894953/GRB7 (+7
72); chr17:37895958-37896009/GRB7 (+1822), IKZF3 (+124457); chr17:38024330-38024423/IKZF3 (−3936), Z
PBP2 (−78); chr17:38255763-38255830/NR1D1 (+1176), THRA (+36729); chr17:38334445-38334528/RAPGEF
L1 (+245); chr17:38347616-38347753/WIPF2 (−27889), RAPGEFL1 (+13443); chr17:38443873-38443912/CDC
6 (−253); chr17:38511540-38511587/GJD3 (+9381), RARA (+46141); chr17:38935823-38935956/KRT26 (−7479),
KRT27 (+2896); chr17:39992508-39992533/KLHL10 (−1522), NT5C3L (+2); chr17:40021442-40021478/KLHL
11 (+169); chr17:40427984-40428103/STAT5B (+380); chr17:40441048-40441131/STAT5A (+1525), STAT3
(+99423); chr17:40441367-40441512/STAT5A (+1875), STAT3 (+99073); chr17:40558167-40558226/STAT3 (−17
684), PTRF (+17141); chr17:40574841-40574882/PTRF (+476); chr17:40684312-40684353/NAGLU (−3618); ch
r17:40822250-40822496/PLEKHH3 (+6675), TUBG2 (+11107); chr17:40825694-40825828/PLEKHH3 (+3287),
TUBG2 (+14495); chr17:40832283-40832365/PLEKHH3 (−3276), CNTNAP1 (−2308); chr17:40932823-4093284
3/WNK4 (+184); chr17:40935970-40936006/WNK4 (+3339), CCDC56 (+14716); chr17:40937395-40937445/W
NK4 (+4771), CCDC56 (+13284); chr17:41174027-41174068/RND2 (−3210), VAT1 (+411); chr17:41791024-417
91085/MEOX1 (−52124), SOST (+45101); chr17:41791344-41791412/MEOX1 (−52447), SOST (+44778); chr17:
41832697-41832729/MEOX1 (−93782), SOST (+3443); chr17:41832872-41833144/MEOX1 (−94077), SOST (+3
148); chr17:41910679-41910700/MPP3 (−143); chr17:41984347-41984363/MPP2 (+758); chr17:41994796-4199
4950/FAM215A (+297); chr17:42030751-42030779/PPY (−10932), PYY (+51072); chr17:42072534-42072599/P
PY (−52734), PYY (+9270); chr17:42264045-42264076/TMUB2 (−293); chr17:42386383-42386418/RUNDC3A
(+474); chr17:42392411-42392465/RUNDC3A (+6511), SLC25A39 (+9779); chr17:42392756-42392796/RUNDC3
A (+6849), SLC25A39 (+9441); chr17:42401501-42401544/SLC25A39 (+694); chr17:42404284-42404323/SLC
25A39 (−2087); chr17:42463324-42463393/FAM171A2 (−22124), ITGA2B (+3514); chr17:42734444-42734502/
DBF4B (−51503), FZD2 (+99661); chr17:42767481-42767556/DBF4B (−18457), FZD2 (+132707); chr17:428357
90-42836011/ADAM11 (−667); chr17:42907631-42907654/GJC1 (+536); chr17:42988995-42989016/GFAP (+39
14), FAM187A (+8879); chr17:43037189-43037325/KIF18B (−12175), C1QL1 (+8387); chr17:43044807-430448
63/C1QL1 (+809); chr17:43047404-43047752/C1QL1 (−1934); chr17:43099558-43099609/C1QL1 (−53940), DC
AKD (+29394); chr17:43198566-43198714/PLCD3 (+11251), NMT1 (+59960); chr17:43221186-43221214/HEXI
M1 (−3484); chr17:43221463-43221574/HEXIM1 (−3165); chr17:43238829-43238870/HEXIM2 (+586); chr17:43
298986-43298996/FMNL1 (−301); chr17:43299291-43299306/FMNL1 (+7); chr17:43324709-43324795/FMNL1
(+25460), MAP3K14 (+69662); chr17:43339408-43339475/FMNL1 (+40150), MAP3K14 (+54972); chr17:435098
42-43509907/ARHGAP27 (−6863), ARHGAP27 (+1237); chr17:43578940-43578973/CRHR1 (−282689), PLEKH
M1 (−10811); chr17:43678205-43678229/CRHR1 (−183429), PLEKHM1 (−110071); chr17:43860818-43860866/
CRHR1 (−804); chr17:43862960-43863021/IMP5 (−59265), CRHR1 (+1345); chr17:43974400-43974472/STH (−1
02180), MAPT (+2688); chr17:43974607-43974621/STH (−102002), MAPT (+2866); chr17:43974831-43974900/
STH (−101750), MAPT (+3118); chr17:44846935-44847043/WNT3 (+49093), NSF (+178954); chr17:44848970-
44848999/WNT3 (+47097), NSF (+180950); chr17:44849801-44849831/WNT3 (+46266), NSF (+181781); chr1
7:44928456-44928485/WNT9B (−497); chr17:44929235-44929255/WNT9B (+277); chr17:44942587-44942694/
GOSR2 (−57845), WNT9B (+13673); chr17:45055801-45055831/RPRML (+798); chr17:45354370-45354488/C1
7orf57 (−46898), ITGB3 (+23221); chr17:45501244-45501325/NPEPPS (−107159), C17orf57 (+99958); chr17:45
726965-45727032/KPNB1 (−276); chr17:45728121-45728131/KPNB1 (+851); chr17:45771124-45771151/TBKB
P1 (−1492); chr17:45772723-45772799/TBKBP1 (+131); chr17:45811758-45811877/TBX21 (+1208), OSBPL7
(+87329); chr17:45918203-45918255/SCRN2 (+470); chr17:45918620-45918690/SCRN2 (+44); chr17:4592468
1-45924816/SCRN2 (−6050), SP6 (+8491); chr17:45924921-45924988/SCRN2 (−6256), SP6 (+8285); chr17:459
28090-45928129/SCRN2 (−9411), SP6 (+5130); chr17:46124970-46125006/NFE2L1 (−698); chr17:46178523-46
178576/CBX1 (+10); chr17:46233723-46233750/SNX11 (+48817), SKAP1 (+273857); chr17:46604392-466045
59/SKAP1 (−96882), HOXB1 (+3796); chr17:46618948-46619087/HOXB1 (−10746), HOXB2 (+3375); chr17:466
19244-46619451/HOXB1 (−11076), HOXB2 (+3045); chr17:46619834-46619851/HOXB1 (−11571), HOXB2 (+25
50); chr17:46622011-46622061/HOXB2 (+357); chr17:46645993-46646011/HOXB2 (−23609), HOXB3 (+5808);
chr17:46647838-46647916/HOXB2 (−25484), HOXB3 (+3933); chr17:46654127-46654153/HOXB3 (−2330); chr1
7:46655419-46655450/HOXB3 (−3625), HOXB4 (+308); chr17:46655999-46656057/HOXB3 (−4218), HOXB4 (−2
85); chr17:46659274-46659384/HOXB4 (−3586); chr17:46659926-46659966/HOXB4 (−4203); chr17:46663825-4
6663855/HOXB4 (−8097), HOXB5 (+7263); chr17:46669646-46669780/HOXB4 (−13970), HOXB5 (+1390); chr1
7:46670028-46670083/HOXB4 (−14313), HOXB5 (+1047); chr17:46673603-46673646/HOXB5 (−2522); chr17:46
690364-46690429/HOXB7 (−2014); chr17:46690705-46690852/HOXB7 (−2396); chr17:46691819-46691987/HO
XB7 (−3520), HOXB8 (+398); chr17:46697019-46697064/HOXB8 (−4741); chr17:46711155-46711236/HOXB9
(−7361), PRAC (+88686); chr17:46711417-46711481/HOXB9 (−7614), PRAC (+88433); chr17:46796374-4679644
1/HOXB9 (−92573), PRAC (+3474); chr17:46796638-46796849/HOXB9 (−92909), PRAC (+3138); chr17:467972
14-46797274/HOXB9 (−93409), PRAC (+2638); chr17:46801048-46801108/PRAC (−1196); chr17:46802912-468
02993/PRAC (−3071); chr17:46811500-46811594/HOXB13 (−5436), TTLL6 (+82922); chr17:46824276-4682435
8/HOXB13 (−18206), TTLL6 (+70152); chr17:46827502-46827625/HOXB13 (−21453), TTLL6 (+66905); chr17:46
830136-46830189/HOXB13 (−24052), TTLL6 (+64306); chr17:46832326-46832489/HOXB13 (−26297), TTLL6
(+62061); chr17:46915331-46915388/ATP5G1 (−54788), CALCOCO2 (+6988); chr17:46985597-46985658/UBE2
Z (−103); chr17:47073029-47073103/IGF2BP1 (−1708); chr17:47073346-47073369/IGF2BP1 (−1416); chr17:470
75735-47075879/B4GALNT2 (−134522), IGF2BP1 (+1033); chr17:47297075-47297113/GNGT2 (−9158), PHOS
PHO1 (+11034); chr17:47301239-47301286/GNGT2 (−13327), PHOSPHO1 (+6865); chr17:47301766-4730180
1/GNGT2 (−13848), PHOSPHO1 (+6344); chr17:47302258-47302426/GNGT2 (−14406), PHOSPHO1 (+5786); c
hr17:47547697-47547746/PHB (−55480), NGFR (−24933); chr17:47647876-47647981/NXPH3 (−5369), NGFR
(+75274); chr17:47841531-47841693/SLC35B1 (−56330), KAT7 (−24369); chr17:47940278-47940304/DLX4 (−106
271), TAC4 (−14912); chr17:47968071-47968095/DLX4 (−78479), TAC4 (−42704); chr17:48041890-48041904/D
LX4 (−4665); chr17:48042141-48042213/DLX4 (−4385); chr17:48042648-48042750/DLX4 (−3863); chr17:480469
80-48047056/DLX4 (+456); chr17:48071705-48071806/DLX3 (+832); chr17:48224717-48224860/PPP1R9B (+3
088), PDK2 (+52150); chr17:48277451-48277483/HILS1 (−27630), COL1A1 (+1533); chr17:48351499-4835161
7/XYLT2 (−71835), TMEM92 (+2791); chr17:48545982-48546068/CHAD (+202); chr17:48546192-48546385/CH
AD (−62); chr17:48546681-48546850/CHAD (−539); chr17:48619291-48619346/SPATA20 (−5110), EPN3 (+9271);
chr17:48691189-48691285/ABCC3 (−20981), CACNA1G (+52788); chr17:48997107-48997172/TOB1 (−53425),
SPAG9 (+201086); chr17:49337431-49337456/UTP18 (−453), MBTD1 (−17); chr17:50235259-50235416/CA10
(+1823), UTP18 (+897441); chr17:52978428-52978453/TOM1L1 (+389); chr17:53341705-53341786/HLF (−575);
chr17:54991753-54991828/TRIM25 (−382); chr17:55123060-55123208/AKAP1 (−39419), SCPEP1 (+67666); c
hr17:55123547-55123602/AKAP1 (−38978), SCPEP1 (+68107); chr17:55123723-55123809/AKAP1 (−38787), S
CPEP1 (+68298); chr17:55333085-55333144/MSI2 (−816); chr17:55951994-55952035/MRPS23 (−24582), VEZF
1 (+113600); chr17:56161224-56161247/DYNLL2 (+456); chr17:56234878-56234937/OR4D2 (−12109), OR4D1
(+2393); chr17:56326751-56326781/LPO (+10979), MPO (+31530); chr17:56405140-56405255/BZRAP1 (+954);
chr17:56410487-56410659/BZRAP1 (−4421); chr17:56564968-56565373/HSF5 (+588); chr17:56565511-5656
5531/HSF5 (+238); chr17:56592027-56592050/HSF5 (−26280), MTMR4 (+3212); chr17:56834001-56834019/P
PM1E (+778); chr17:57183731-57183806/TRIM37 (+497); chr17:57642657-57642736/DHX40 (−189); chr17:581
03146-58103169/RNFT1 (−61041), HEATR6 (+53134); chr17:58216303-5821 6565/AP1S2 (−36154), CA4 (−1086
8); chr17:58216837-58216865/AP1S2 (−36571), CA4 (−10451); chr17:58217299-58217356/AP1S2 (−37048), CA
4 (−9974); chr17:58227411-58227434/CA4 (+121); chr17:59473504-59473558/TBX2 (−3726); chr17:59473671-5
9473906/TBX2 (−3468); chr17:59474441-59474484/TBX2 (−2794); chr17:59478889-59478957/TBX4 (−54884), T
BX2 (+1666); chr17:59480396-59480516/TBX4 (−53351), TBX2 (+3199); chr17:59480855-59480953/TBX4 (−52
903), TBX2 (+3647); chr17:59481679-59481798/TBX4 (−52068), TBX2 (+4482); chr17:59482168-59482245/TB
X4 (−51600), TBX2 (+4950); chr17:59482595-59482693/TBX4 (−51163), TBX2 (+5387); chr17:59485687-59485
778/TBX4 (−48074), TBX2 (+8476); chr17:59487527-59487608/TBX4 (−46239), TBX2 (+10311); chr17:5948912
9-59489181/TBX4 (−44652), TBX2 (+11898); chr17:59529151-59529253/TBX4 (−4605); chr17:59529390-59529
843/TBX4 (−4190); chr17:59532042-59532269/TBX4 (−1651); chr17:59532518-59532591/TBX4 (−1252); chr17:5
9533768-59533874/TBX4 (+14); chr17:59534406-59534556/TBX4 (+674); chr17:60704362-60704402/MRC2
(−380); chr17:61512642-61512695/CYB561 (+10876), TANC2 (+425771); chr17:61516023-61516064/CYB561
(+7501), TANC2 (+429146); chr17:61524163-61524220/CYB561 (−647); chr17:61777667-61777721/LIMD2 (−175);
chr17:61778074-61778106/LIMD2 (−571); chr17:61778249-61778423/LIMD2 (−817); chr17:61778549-6177871
8/LIMD2 (−1115); chr17:61850799-61850823/DDX42 (−756), CCDC47 (+277); chr17:61926325-61926507/SMA
RCD2 (−6065), CSH2 (+24673); chr17:61926625-61926759/SMARCD2 (−6341), CSH2 (+24397); chr17:6203898
0-62039019/CD79B (−29296), SCN4A (+11278); chr17:62097917-62098020/ICAM2 (+25); chr17:62208165-622
08238/ERN1 (−700); chr17:62340247-62340352/TEX2 (+353); chr17:62492984-62493015/POLG2 (+184); chr17:
62657954-62658003/SMURF2 (+407); chr17:62658493-62658507/SMURF2 (−114); chr17:62658776-62658830/
SMURF2 (−417); chr17:62774545-62774587/SMURF2 (−116180), LOC146880 (+3056); chr17:62774784-62774
871/SMURF2 (−116442), LOC146880 (+2794); chr17:62775015-62775170/SMURF2 (−116707), LOC146880 (+2
529); chr17:62775845-62775864/SMURF2 (−117469), LOC146880 (+1767); chr17:62776423-62776446/SMURF
2 (−118049), LOC146880 (+1187); chr17:62972120-62972213/LRRC37A3 (−57179), GNA13 (+80753); chr17:63
052281-63052314/GNA13 (+622); chr17:64447706-64447819/CACNG5 (−425585), PRKCA (+148837); chr17:6
4962267-64962287/CACNG1 (−78375), CACNG4 (+1297); chr17:64962513-64962592/CACNG1 (−78099), CAC
NG4 (+1573); chr17:65266480-65266608/HELZ (−25225), PSMD12 (+96177); chr17:65821526-65821565/BPTF
(−234); chr17:65989821-65989837/KPNA2 (−42019), BPTF (+168049); chr17:66097351-66097376/AMZ2 (−146
781), KPNA2 (+65516); chr17:66097977-66098022/AMZ2 (−146145), KPNA2 (+66152); chr17:66193039-66193
079/AMZ2 (−51086), KPNA2 (+161211); chr17:66194561-66194593/AMZ2 (−49568), KPNA2 (+162729); chr17:6
6194749-66194824/AMZ2 (−49358), KPNA2 (+162939); chr17:66201212-66201233/AMZ2 (−42922), KPNA2 (+1
69375); chr17:66243589-66243743/AMZ2 (−479); chr17:66243856-66243888/AMZ2 (−273); chr17:66244393-66
244456/AMZ2 (+280); chr17:66308870-66309006/SLC16A6 (−21533), WIPI1 (+144715); chr17:66508805-66508
832/PRKAR1A (+709); chr17:66509087-66509117/PRKAR1A (+992); chr17:66597515-66597560/FAM20A (−44
3); chr17:67323767-67323835/ABCA5 (−478); chr17:70112164-70112352/SOX9 (−4903); chr17:70113567-7011
3647/SOX9 (−3554); chr17:70114019-70114152/SOX9 (−3075); chr17:70119110-70119135/SOX9 (+1962), SLC
39A11 (+969730); chr17:70119553-70119570/SOX9 (+2401), SLC39A11 (+969291); chr17:70119837-7011994
4/SOX9 (+2730), SLC39A11 (+968962); chr17:70120106-70120133/SOX9 (+2959), SLC39A11 (+968733); chr1
7:70216307-70216392/SOX9 (+99189), SLC39A11 (+872503); chr17:70379270-70379341/SOX9 (+262145), S
LC39A11 (+709547); chr17:70636836-70636875/SLC39A11 (+451997), SOX9 (+519695); chr17:71161159-711
61183/SSTR2 (+11); chr17:71227501-71227555/C17orf80 (−1248); chr17:71398132-71398201/CDC42EP4 (−90
024), SDK2 (+242060); chr17:71736508-71736595/RPL38 (−463243), SDK2 (−96325); chr17:71898164-718982
28/RPL38 (−301599), SDK2 (−257969); chr17:72281096-72281163/KIF19 (−41221), DNAI2 (+10744); chr17:723
22558-72322611/KIF19 (+234); chr17:72322790-72322818/KIF19 (+453); chr17:72353260-72353416/BTBD17
(+4620), KIF19 (+30987); chr17:72450313-72450330/CD300A (−12200), GPRC5C (+20486); chr17:72462521-72
462598/CD300A (+38); chr17:72667482-72667681/CD300E (−47685), CD300LF (+41526); chr17:72754588-727
54712/SLC9A3R1 (+9887), NAT9 (+17820); chr17:72755637-72755752/SLC9A3R1 (+10932), NAT9 (+16775);
chr17:72839288-72839323/GRIN2C (+16701), TMEM104 (+66684); chr17:72848460-72848486/GRIN2C (+753
4), TMEM104 (+75851); chr17:72848851-72848870/GRIN2C (+7146), TMEM104 (+76239); chr17:72869671-72
869734/FDXR (−547); chr17:72889357-72889430/FADS6 (+311); chr17:72931948-72932011/OTOP3 (+83); chr
17:73073684-73073928/SLC16A5 (−10249), KCTD2 (+30527); chr17:73110635-73110676/ARMC7 (+4574), NT
5C (+17234); chr17:73127747-73127802/NT5C (+115); chr17:73177807-73177866/HN1 (−27062), SUMO2 (+12
61); chr17:73286126-73286178/SLC25A19 (−622); chr17:73401627-73401658/GRB2 (+147); chr17:73512219-7
3512283/CASKIN2 (−624), TSEN54 (−358); chr17:73521178-73521238/LLGL2 (−575); chr17:73522427-7352248
2/LLGL2 (+672); chr17:73532558-73532630/MYO15B (−51545), LLGL2 (+10811); chr17:73584107-73584160/M
YO15B (−5); chr17:73584394-73584657/MYO15B (+387); chr17:73749592-73749684/GALK1 (+11642), ITGB4
(+32122); chr17:73749813-73750133/GALK1 (+11307), ITGB4 (+32457); chr17:73760840-73760881/GALK1 (+4
19); chr17:73851279-73851335/WBP2 (+194); chr17:73873681-73873726/TRIM47 (+952); chr17:73900929-73
900950/MRPL38 (+241); chr17:74070480-74070709/ZACN (−4668), SRP68 (−1988), GALR2 (−297); chr17:7407
1978-74072049/SRP68 (−3407), ZACN (−3249); chr17:74072711-74072998/SRP68 (−4248), ZACN (−2408); chr1
7:74118061-74118117/EXOC7 (−18221), FOXJ1 (+19291); chr17:74118235-74118360/EXOC7 (−18430), FOXJ
1 (+19082); chr17:74126709-74126808/EXOC7 (−26891), FOXJ1 (+10621); chr17:74136212-74136244/EXOC7
(−36360), FOXJ1 (+1152); chr17:74136442-74136570/FOXJ1 (+874); chr17:74141516-74141579/FOXJ1 (−4168);
chr17:74235881-74235976/RNF157 (+461); chr17:74349121-74349164/RNF157 (−112753), PRPSAP1 (+108
7); chr17:74350082-74350131/PRPSAP1 (+123); chr17:74533558-74533674/PRCD (−2505), CYGB (+166); chr
17:74534363-74534387/PRCD (−1746), CYGB (−593); chr17:74553278-74553405/PRCD (+17221), ST6GALNA
C2 (+28803); chr17:74564967-74565084/ST6GALNAC2 (+17119), PRCD (+28905); chr17:74668194-74668251/
ST6GALNAC1 (−28329), MXRA7 (+38833); chr17:74722474-74722507/METTL23 (−421), JMJD6 (+390); chr17:
74868861-74868886/SEC14L1 (−268131), MGAT5B (+4076); chr17:74994453-74994500/SEC14L1 (−142528),
MGAT5B (+129679); chr17:75033184-75033232/SEC14L1 (−103797), MGAT5B (+168410); chr17:75369458-75
369492/TNRC6C (−630843), SEPT9 (+91983); chr17:75370116-75370185/TNRC6C (−630167), SEPT9 (+92659);
chr17:75372359-75372419/TNRC6C (−627929), SEPT9 (+94897); chr17:75386077-75386103/TNRC6C (−614
228), SEPT9 (+108598); chr17:75693115-75693216/TNRC6C (−307152), SEPT9 (+415674); chr17:76113692-7
6113738/TMC6 (+11146), TNRC6C (+113397); chr17:76127314-76127425/TMC6 (−2509), TMC8 (+511); chr17:
76127527-76127551/TMC6 (−2678), TMC8 (+680); chr17:76127922-76128044/TMC6 (−3122), TMC8 (+1124); c
hr17:76128664-76128693/TMC6 (−3818), TMC8 (+1820); chr17:76133903-76133936/C17orf99 (−8514), TMC8
(+7061); chr17:76228162-76228213/TMEM235 (+797); chr17:76254727-76254836/TMEM235 (+27391), SOCS3
(+101376); chr17:76259469-76259526/TMEM235 (+32107), SOCS3 (+96660); chr17:76275001-76275113/TM
EM235 (+47666), SOCS3 (+81101); chr17:76356583-76356613/SOCS3 (−440); chr17:76380936-76380981/PG
S1 (+6224), DNAH17 (+192517); chr17:76771016-76771064/DNAH17 (−197564), CYTH1 (+7336); chr17:76836
688-76836714/USP36 (+268); chr17:76921355-76921422/TIMP2 (+83); chr17:76921806-76921859/TIMP2 (−36
1); chr17:77020266-77020313/C1QTNF1 (+39); chr17:77178872-77178962/ENGASE (+107898), RBFOX3 (+29
9763); chr17:77179064-77179081/ENGASE (+108054), RBFOX3 (+299607); chr17:77179330-77179380/ENGA
SE (+108336), RBFOX3 (+299325); chr17:77179483-77179617/ENGASE (+108531), RBFOX3 (+299130); chr1
7:77179777-77179799/ENGASE (+108769), RBFOX3 (+298892); chr17:77397120-77397189/RBFOX3 (+81525),
ENGASE (+326136); chr17:77721549-77721582/CBX2 (−30411), ENPP7 (+16684); chr17:77721756-7772203
8/CBX2 (−30080), ENPP7 (+17015); chr17:77722215-77722442/CBX2 (−29648), ENPP7 (+17447); chr17:77751
046-77751068/CBX2 (−920); chr17:77752269-77752326/CBX2 (+321); chr17:77753177-77753284/CBX2 (+125
4), CBX8 (+17684); chr17:77763481-77763545/CBX8 (+7402), CBX2 (+11536); chr17:77764786-77764828/CB
X8 (+6108), CBX2 (+12830); chr17:77776996-77777052/CBX8 (−6109), CBX4 (+36189); chr17:77777904-7777
7943/CBX8 (−7009), CBX4 (+35289); chr17:77788346-77788400/CBX8 (−17458), CBX4 (+24840); chr17:77788
883-77788911/CBX8 (−17982), CBX4 (+24316); chr17:77789296-77789473/CBX8 (−18470), CBX4 (+23828); ch
r17:77789587-77789717/CBX8 (−18737), CBX4 (+23561); chr17:77805979-77805997/CBX8 (−35073), CBX4
(+7225); chr17:77806339-77806352/CBX8 (−35431), CBX4 (+6867); chr17:77814169-77814364/CBX4 (−1054); ch
r17:77815985-77816033/CBX4 (−2796); chr17:77916814-77916886/CBX4 (−103637), TBC1D16 (+92797); chr17:
78010753-78010812/TBC1D16 (−1136), CCDC40 (+352); chr17:78120623-78120666/EIF4A3 (+337); chr17:78
450937-78450959/NPTX1 (−544); chr17:78451954-78452108/NPTX1 (−1627); chr17:78955176-78955204/CHM
P6 (−10451), RPTOR (+436565); chr17:78977613-78977693/BAIAP2 (−31294), CHMP6 (+12012); chr17:789923
73-78992454/BAIAP2 (−16533), CHMP6 (+26773); chr17:79007416-79007488/BAIAP2 (−1495); chr17:79125227-
79125258/AATK (+14629), BAIAP2 (+116296); chr17:79134164-79134195/AATK (+5692), BAIAP2 (+125233);
chr17:79134688-79134748/AATK (+5154), BAIAP2 (+125771); chr17:79139981-79140028/AATK (−133); chr17:
79192402-79192482/AATK (−52570), AZI1 (+4309); chr17:79259009-79259050/SLC38A10 (+10066), C17orf89
(+45919); chr17:79315066-79315125/BAHCC1 (−58444), TMEM105 (−10622); chr17:79315417-79315511/BAH
CC1 (−58076), TMEM105 (−10990); chr17:79315615-79315782/BAHCC1 (−57841), TMEM105 (−11225); chr17:7
9316389-79316427/BAHCC1 (−57132), TMEM105 (−11934); chr17:79317101-79317178/BAHCC1 (−56400), TM
EM105 (−12666); chr17:79370667-79370707/BAHCC1 (−2853); chr17:79387021-79387056/BAHCC1 (+13499),
ACTG1 (+92853); chr17:79405398-79405477/BAHCC1 (+31898), ACTG1 (+74454); chr17:79420883-79420919/
BAHCC1 (+47361), ACTG1 (+58991); chr17:79450366-79450417/ACTG1 (+29500), BAHCC1 (+76852); chr17:
79450990-79451034/ACTG1 (+28880), BAHCC1 (+77472); chr17:79504021-79504047/FSCN2 (+8617), C17orf
70 (+15395); chr17:79614999-79615035/TSPAN10 (+5684), PDE6G (+8590); chr17:79615325-79615434/TSPA
N10 (+6047), PDE6G (+8227); chr17:79620320-79620357/PDE6G (+3268), TSPAN10 (+11006); chr17:796204
64-79620575/PDE6G (+3087), TSPAN10 (+11187); chr17:79650823-79650872/HGS (−114), ARL16 (+106); chr
17:79707714-79707780/GCGR (−54263), SLC25A10 (+28376); chr17:79761813-79761833/GCGR (−187); chr17:
79762870-79762898/GCGR (+874); chr17:79790751-79790787/P4HB (+27775), GCGR (+28759); chr17:7981
8183-79818230/P4HB (+337); chr17:79882016-79882056/MAFG (−592); chr17:79919509-79919572/NOTUM
(−484); chr17:79919891-79919913/NOTUM (−845); chr17:79935345-79935368/ASPSCR1 (−69); chr17:79988144-
79988226/RAC3 (−1347); chr17:79989846-79989868/RAC3 (+325); chr17:79990232-79990262/RAC3 (+715); c
hr17:80057399-80057502/FASN (−1345); chr17:80064159-80064207/SLC16A3 (−122099), FASN (−8077); chr17:
80085286-80085323/SLC16A3 (−100977), FASN (−29199); chr17:80188628-80188673/SLC16A3 (+2369), CSN
K1D (+42943); chr17:80250237-80250279/CSNK1D (−18664), CD7 (+25222); chr17:80272852-80272918/CSNK
1D (−41291), CD7 (+2595); chr17:80273790-80273862/CSNK1D (−42232), CD7 (+1654); chr17:80291972-8029
2003/SECTM1 (−67); chr17:80330001-80330164/UTS2R (−2118); chr17:80332826-80332928/UTS2R (+676); ch
r17:80333241-80333309/HEXDC (−42977), UTS2R (+1074); chr17:80477829-80477847/FOXK2 (+244); chr17:8
0943958-80944089/ZNF750 (−146093), B3GNTL1 (+65662); chr17:81027192-81027252/B3GNTL1 (−17536), M
ETRNL (−10345); chr17:81037295-81037327/METRNL (−256); chr17:81038844-81038865/METRNL (+1288); ch
r17:81039672-81039746/METRNL (+2142); chr17:81147427-81147479/METRNL (+109886); chr18:597185-597
228/CLUL1 (−19493), CETN1 (+16838); chr18:712732-712794/ENOSF1 (−101); chr18:712960-712987/ENOSF1
(−312); chr18:905616-905692/ADCYAP1 (+357); chr18:907694-907721/ADCYAP1 (+2411); chr18:908271-9082
99/ADCYAP1 (+2988); chr18:909085-909183/ADCYAP1 (+3837); chr18:909289-909318/ADCYAP1 (+4007); ch
r18:2905921-2906054/EMILIN2 (+58960), LPIN2 (+105957); chr18:4454691-4454777/DLGAP1 (+532); chr18:4
455031-4455258/DLGAP1 (+121); chr18:4455418-4455538/DLGAP1 (−212); chr18:5196259-5196575/DLGAP1
(−741151), ZFP161 (+99777); chr18:5197272-5197329/DLGAP1 (−742035), ZFP161 (+98893); chr18:5543158-5
543337/EPB41L3 (+738); chr18:5543752-5543899/EPB41L3 (+160); chr18:5629484-5629569/EPB41L3 (−8554
1), TMEM200C (+262576); chr18:5629829-5629999/EPB41L3 (−85928), TMEM200C (+262189); chr18:5630655-
5630693/EPB41L3 (−86688), TMEM200C (+261429); chr18:5869021-5869147/EPB41L3 (−325098), TMEM200
C (+23019); chr18:5890337-5890541/EPB41L3 (−346453), TMEM200C (+1664); chr18:5890847-5891242/EPB4
1L3 (−347059), TMEM200C (+1058); chr18:5891421-5891443/TMEM200C (+671); chr18:5894946-5895017/TM
EM200C (−2879); chr18:6414127-6414203/L3MBTL4 (+745); chr18:6414445-6414507/L3MBTL4 (+434); chr18:
7116331-7116449/LAMA1 (+1423), ARHGAP28 (+281958); chr18:7116883-7117059/LAMA1 (+842); chr18:711
7320-7117374/LAMA1 (+466); chr18:7117560-7117615/LAMA1 (+225); chr18:7118091-7118131/LAMA1 (−298);
chr18:7566756-7566780/PTPRM (−546); chr18:7568718-7568792/PTPRM (+1441); chr18:8367459-8367503/R
AB12 (−241962), PTPRM (+800167); chr18:8608838-8608901/RAB12 (−573); chr18:8705763-8705789/NDUFV2
(−396852), RAB12 (+96333); chr18:9136324-9136383/ANKRD12 (−397); chr18:9136517-9136541/ANKRD12
(−222); chr18:9333896-9333927/TWSG1 (−853); chr18:9613780-9613823/PPP4R1 (+798); chr18:10032410-1003
2552/APCDD1 (−422144), VAPA (+118526); chr18:10032685-10032841/APCDD1 (−421862), VAPA (+118808);
chr18:10726296-10726413/NAPG (+200482), PIEZO2 (+422406); chr18:11148625-11148741/PIEZO2 (+78); ch
r18:11149094-11149115/PIEZO2 (−344); chr18:11149274-11149298/PIEZO2 (−525); chr18:11149760-11149779/
PIEZO2 (−1009); chr18:11752007-11752075/CHMP1B (−99348), GNAL (+62905); chr18:11752605-11752640/C
HMP1B (−98766), GNAL (+63487); chr18:12246920-12247054/CIDEA (−7331), ANKRD62 (+144282); chr18:122
54147-12254304/CIDEA (−92); chr18:12254856-12254902/CIDEA (+561); chr18:12307506-12307602/TUBB6
(−703); chr18:12408323-12408339/SLMO1 (+436); chr18:12420804-12420854/SLMO1 (+12934), SPIRE1 (+2370
83); chr18:12911221-12911577/SEH1L (−36584), PTPN2 (−27065); chr18:13136145-13136192/C18orf1 (−82617),
CEP192 (+144808); chr18:13217094-13217130/C18orf1 (−1674); chr18:13611408-13611480/FAM210A (+115
147), C18orf1 (+392658); chr18:13611980-13612020/FAM210A (+114591), C18orf1 (+393214); chr18:1386892
0-13868946/MC5R (+43390), MC2R (+46602); chr18:14450449-14450486/ZNF519 (−317979), ANKRD30B (−29
7771); chr18:14748108-14748450/ANKRD30B (+40); chr18:14999428-14999468/ANKRD30B (+251209); chr18:
15197677-15197744/ANKRD30B (+449472); chr18:15198278-15198299/ANKRD30B (+450050); chr18:191796
98-19179728/ESCO1 (+980); chr18:19179897-19179961/ESCO1 (+764); chr18:19284709-19284753/ABHD3
(+35); chr18:19745475-19745613/GATA6 (−3872); chr18:19745725-19745928/GATA6 (−3589); chr18:19746239-1
9746384/GATA6 (−3104); chr18:19747083-19747141/GATA6 (−2304); chr18:19751836-19751869/GATA6 (+243
7), CTAGE1 (+246025); chr18:19756471-19756539/GATA6 (+7089), CTAGE1 (+241373); chr18:19756876-197
56983/GATA6 (+7514), CTAGE1 (+240948); chr18:19929051-19929116/CTAGE1 (+68794), GATA6 (+179668);
chr18:20512838-20512902/RBBP8 (−425); chr18:21851525-21851561/OSBPL1A (+126290), CABYR (+132588);
chr18:22929096-22929186/ZNF521 (+3073), HRH4 (+888548); chr18:22929798-22929820/ZNF521 (+2405),
HRH4 (+889216); chr18:24130947-24131098/KCTD1 (−2523); chr18:24765188-24765230/CHST9 (+80); chr18:
25755452-25755555/CHST9 (−990215), CDH2 (+1941); chr18:25757972-25758128/CDH2 (−605); chr18:286209
56-28621033/DSC3 (+1786); chr18:28622998-28623039/DSC3 (−238); chr18:28682246-28682286/DSC2 (+122);
chr18:29672872-29672905/RNF138 (+320); chr18:31739642-31739742/NOL4 (+63823), ASXL3 (+581151); c
hr18:31803660-31803673/NOL4 (−152); chr18:32074321-32074337/NOL4 (−270814), DTNA (−261611); chr18:3
3529960-33529996/SLC39A6 (+179379), GALNT1 (+295445); chr18:33709047-33709083/ELP2 (−772), SLC39
A6 (+292); chr18:33877151-33877206/FHOD3 (−523); chr18:33962286-33962330/FHOD3 (+84606), TPGS2
(+446850); chr18:34823778-34823862/TPGS2 (−414662), CELF4 (+322180); chr18:34833554-34833582/TPGS2
(−424410), CELF4 (+312432); chr18:34833767-34833937/TPGS2 (−424694), CELF4 (+312148); chr18:34854793-
34854858/TPGS2 (−445668), CELF4 (+291174); chr18:35065431-35065455/TPGS2 (−656285), CELF4 (+8055
7); chr18:35104551-35104934/TPGS2 (−695585), CELF4 (+41257); chr18:35144215-35144277/TPGS2 (−73508
8), CELF4 (+1754); chr18:35144937-35144968/TPGS2 (−735795), CELF4 (+1047); chr18:35146037-35146061/
CELF4 (−49); chr18:35146765-35146895/CELF4 (−830); chr18:35147169-35147245/CELF4 (−1207); chr18:3514
7804-35147834/CELF4 (−1819); chr18:44335851-44335917/LOXHD1 (−98888), ST8SIA5 (+1155); chr18:44336
489-44336523/ST8SIA5 (+533); chr18:44336763-44336788/ST8SIA5 (+263); chr18:44337618-44337649/ST8SI
A5 (−595); chr18:44338021-44338079/ST8SIA5 (−1011); chr18:44497277-44497343/PIAS2 (+185); chr18:44677
031-44677055/HDHD2 (−172); chr18:44773117-44773466/IER3IP1 (−70547), SKOR2 (+2262); chr18:44773970-
44774081/IER3IP1 (−71281), SKOR2 (+1528); chr18:44777792-44777862/SKOR2 (−2273); chr18:44787412-44
787491/SKOR2 (−11898), SMAD2 (+670063); chr18:44788869-44788908/SKOR2 (−13335), SMAD2 (+668626);
chr18:44790115-44790144/SKOR2 (−14576), SMAD2 (+667385); chr18:44790474-44790495/SKOR2 (−14931),
SMAD2 (+667030); chr18:45058293-45058307/SKOR2 (−282746), SMAD2 (+399215); chr18:45456613-454566
77/SMAD2 (+870); chr18:45534647-45534675/SMAD2 (−77146), ZBTB7C (+129019); chr18:45934223-4593431
7/ZBTB7C (−270590), CTIF (−131157); chr18:45934467-45934609/ZBTB7C (−270858), CTIF (−130889); chr18:4
6065605-46065659/CTIF (+205); chr18:46307640-46307700/SMAD7 (+169411), CTIF (+242243); chr18:46361
269-46361322/SMAD7 (+115785), CTIF (+295869); chr18:47340158-47340233/ACAA2 (+55); chr18:47794670-
47794700/CCDC11 (−1820); chr18:47794875-47794919/CCDC11 (−2032); chr18:48405502-48405525/ME2 (+8
2); chr18:49866360-49866411/DCC (−156); chr18:53447481-53447528/TCF4 (−144317), TXNL1 (+858765); chr
18:53447772-53447798/TCF4 (−144597), TXNL1 (+858485); chr18:55019929-55020166/ST8SIA3 (+327); chr18:
55020699-55020804/ONECUT2 (−82165), ST8SIA3 (+1031); chr18:55020945-55020965/ONECUT2 (−81962),
ST8SIA3 (+1234); chr18:55095157-55095278/ONECUT2 (−7699), ST8SIA3 (+75497); chr18:55095498-550956
93/ONECUT2 (−7321), ST8SIA3 (+75875); chr18:55095912-55096113/ONECUT2 (−6904), ST8SIA3 (+76292); c
hr18:55101991-55102007/ONECUT2 (−918); chr18:55103414-55103761/ONECUT2 (+671); chr18:55103881-55
103897/ONECUT2 (+972); chr18:55104141-55104166/ONECUT2 (+1237), FECH (+149815); chr18:55107309-
55107361/ONECUT2 (+4418), FECH (+146634); chr18:55107885-55107937/ONECUT2 (+4994), FECH (+1460
58); chr18:55253592-55253637/FECH (+354); chr18:55470841-55470898/ATP8B1 (−543); chr18:56028818-560
28858/ALPK2 (+267351), NEDD4L (+317228); chr18:56338879-56338915/MALT1 (+279); chr18:56530991-565
31013/ZNF532 (+941); chr18:56531194-56531228/SEC11C (−275914), ZNF532 (+1150); chr18:56806666-5680
6694/SEC11C (−445); chr18:56887469-56887502/GRP (+86); chr18:56887859-56887906/GRP (+483); chr18:56
888327-56888384/GRP (+956); chr18:56888656-56888686/GRP (+1271), RAX (+51954); chr18:56935407-569
35479/RAX (+5182), GRP (+48043); chr18:56939652-56939763/RAX (+917); chr18:56940293-56940359/RAX
(+299); chr18:56940504-56940557/RAX (+94); chr18:56941252-56941301/RAX (−652); chr18:56941492-569415
30/RAX (−886); chr18:57364397-57364447/CCBE1 (+222); chr18:57567093-57567153/PMAIP1 (−69); chr18:590
01344-59001497/MC4R (−961420), CDH20 (−156214); chr18:59854194-59854260/KIAA1468 (−297); chr18:5999
2482-59992500/TNFRSF11A (−57); chr18:60105452-60105512/ZCCHC2 (−85176), TNFRSF11A (+112934); chr
18:60190048-60190084/ZCCHC2 (−592); chr18:60263544-60263660/PHLPP1 (−119070), ZCCHC2 (+72944); ch
r18:60985533-60985592/BCL2 (+1050), PHLPP1 (+602891); chr18:63418027-63418056/CDH7 (+554); chr18:6
7067971-67067995/DOK6 (−301); chr18:70209013-70209101/CBLN2 (+2666); chr18:70209437-70209473/CBL
N2 (+2268); chr18:70533794-70533988/NETO1 (+919); chr18:70534338-70534427/NETO1 (+427); chr18:7053
4965-70535184/NETO1 (−265); chr18:70535555-70535575/NETO1 (−755); chr18:70536084-70536187/NETO1
(−1326); chr18:72124190-72124237/FAM69C (+289); chr18:72265466-72265482/ZNF407 (−77449), CNDP1 (+63
782); chr18:72916860-72916977/ZADH2 (+4362), ZNF407 (+573996); chr18:73167311-73167421/C18orf62 (−2
7777); chr18:73168178-73168246/C18orf62 (−28623); chr18:73628246-73628367/C18orf62 (−488718), ZNF516
(+578839); chr18:74101932-74102065/C18orf62 (−962410), ZNF516 (+105147); chr18:74118110-74118196/C1
8orf62 (−978564), ZNF516 (+88993); chr18:74163574-74163597/ZNF516 (+43560); chr18:74535698-74535735/
ZNF236 (−399); chr18:74717116-74717217/MBP (+127607), ZNF236 (+181051); chr18:74766739-74766788/M
BP (+78010), ZNF236 (+230648); chr18:74826680-74826773/MBP (+18047), ZNF236 (+290611); chr18:749619
56-74962018/GALR1 (−21); chr18:74962171-74962209/GALR1 (+182); chr18:74962344-74962407/GALR1 (+36
8); chr18:74963546-74963720/GALR1 (+1625); chr18:75981488-75981603/SALL3 (−758729); chr18:76541636-
76541648/SALL3 (−198633); chr18:76733725-76733854/SALL3 (−6485); chr18:76734078-76734256/SALL3 (−61
08); chr18:76737116-76737231/SALL3 (−3101); chr18:76737530-76737609/SALL3 (−2705); chr18:76740224-76
740339/SALL3 (+7); chr18:76740452-76740768/SALL3 (+335); chr18:77159295-77159405/NFATC1 (−976); chr
18:77159576-77159790/NFATC1 (−643); chr18:77199340-77199436/CTDP1 (−240413), NFATC1 (+39062); chr1
8:77397602-77398025/CTDP1 (−41987), NFATC1 (+237488); chr18:77439855-77439887/CTDP1 (+70); chr18:7
7451019-77451125/KCNG2 (−172596), CTDP1 (+11271); chr18:77548055-77548140/KCNG2 (−75570), CTDP1
(+108297); chr18:77550591-77550705/KCNG2 (−73020), CTDP1 (+110847); chr18:77557891-77557912/KCNG
2 (−65766), CTDP1 (+118101); chr18:77558397-77558416/KCNG2 (−65261), CTDP1 (+118606); chr18:7771190
1-77711925/PQLC1 (−260); chr18:77724279-77724331/HSBP1L1 (−277); chr19:267139-267205/PPAP2C (+239
97), OR4F17 (+156493); chr19:383938-384078/THEG (−7995), SHC2 (+76988); chr19:405794-405930/THEG
(−29849), SHC2 (+55134); chr19:488642-488679/SHC2 (−27665), MADCAM1 (−7829); chr19:498697-498732/TPG
S1 (−8782), MADCAM1 (+2225); chr19:519003-519034/CDC34 (−12714), TPGS1 (+11522); chr19:532781-5328
48/GZMM (−11212), CDC34 (+1082); chr19:560266-560308/BSG (−12250), GZMM (+16260); chr19:590156-590
277/HCN2 (+324); chr19:590390-590605/HCN2 (+605); chr19:591018-591031/HCN2 (+1132), POLRMT (+4254
3); chr19:680532-680552/FSTL3 (+4153), PRSS57 (+14919); chr19:681322-681567/FSTL3 (+5056), PRSS57
(+14016); chr19:695363-695567/PRSS57 (−4); chr19:695687-695794/PRSS57 (−280); chr19:708540-708630/PA
LM (−368); chr19:709782-709821/PALM (+849); chr19:720847-720901/PTBP1 (−76518), PALM (+11921); chr19:
757464-757497/PTBP1 (−39911), PALM (+48528); chr19:796733-796768/PTBP1 (−641); chr19:797084-797226/
PTBP1 (−237); chr19:797934-797942/PTBP1 (+546); chr19:830584-830713/PRTN3 (−10336), AZU1 (+2818); ch
r19:853322-853343/CFD (−6332), ELANE (+1042); chr19:863839-863983/CFD (+4246), MED16 (+29307); chr1
9:913129-913161/KISS1R (−4197), R3HDM4 (+80); chr19:925222-925261/ARID3A (−795); chr19:932840-93290
0/GRIN3B (−67567), ARID3A (+6833); chr19:933054-933096/GRIN3B (−67362), ARID3A (+7038); chr19:941030-
941246/GRIN3B (−59299), ARID3A (+15101); chr19:947649-947704/GRIN3B (−52760), ARID3A (+21640); chr1
9:947870-947935/GRIN3B (−52534), ARID3A (+21866); chr19:982781-982813/GRIN3B (−17640), ARID3A (+56
760); chr19:1021093-1021103/C19orf6 (+43); chr19:1047183-1047263/HMHA1 (−19951), ABCA7 (+7121); chr1
9:1066688-1066750/HMHA1 (−455); chr19:1068371-1068542/HMHA1 (+1283), POLR2E (+26934); chr19:10743
72-1074764/HMHA1 (+7394), POLR2E (+20823); chr19:1088313-1088409/POLR2E (+7030), HMHA1 (+21187);
chr19:1104050-1104079/GPX4 (+129); chr19:1132866-1132916/GPX4 (+28955), SBNO2 (+41391); chr19:117
4237-1174258/SBNO2 (+34); chr19:1213741-1213868/STK11 (+8007), C19orf26 (+24185); chr19:1214098-121
4206/STK11 (+8354), C19orf26 (+23838); chr19:1240537-1240586/C19orf26 (−2572), ATP5D (−1187); chr19:12
41528-1241589/C19orf26 (−3569), ATP5D (−190); chr19:1241941-1241997/C19orf26 (−3979), ATP5D (+220); ch
r19:1242156-1242211/C19orf26 (−4194), ATP5D (+435); chr19:1249336-1249389/MIDN (+811); chr19:1266006-
1266059/CIRBP (−3234); chr19:1266260-1266295/CIRBP (−2989); chr19:1275417-1275573/C19orf24 (−25); chr
19:1276190-1276217/C19orf24 (+684); chr19:1288079-1288133/MUM1 (−66870), EFNA2 (+1953); chr19:12954
26-1295723/MUM1 (−59401), EFNA2 (+9422); chr19:1295834-1295873/MUM1 (−59122), EFNA2 (+9701); chr19:
1363554-1363652/NDUFS7 (−20104), MUM1 (+8627); chr19:1402394-1402510/GAMT (−900); chr19:1457047-1
457070/APC2 (+6911), C19orf25 (+22169); chr19:1466971-1467028/C19orf25 (+12228), APC2 (+16852); chr19:
1467138-1467346/C19orf25 (+11986), APC2 (+17094); chr19:1467505-1467523/C19orf25 (+11714), APC2 (+1
7366); chr19:1467710-1467840/C19orf25 (+11453), APC2 (+17627); chr19:1468012-1468203/C19orf25 (+1112
0), APC2 (+17960); chr19:1468336-1468375/C19orf25 (+10872), APC2 (+18208); chr19:1490473-1490513/RE
EP6 (−672), PCSK4 (−86); chr19:1490954-1491008/PCSK4 (−574), REEP6 (−184); chr19:1513722-1513772/ADA
MTSL5 (−559); chr19:1523893-1523906/PLK5 (−173); chr19:1524207-1524270/PLK5 (+166); chr19:1524383-15
24442/PLK5 (+340); chr19:1591452-1591499/MEX3D (−23419), MBD3 (+1176); chr19:1608825-1608910/UQCR
11 (−3385); chr19:1650685-1650721/TCF3 (−417); chr19:1726105-1726136/TCF3 (−75835), ONECUT3 (−27541);
chr19:1734453-1734497/TCF3 (−84189), ONECUT3 (−19187); chr19:1754194-1754224/ONECUT3 (+547); chr
19:1761853-1761983/ONECUT3 (+8256), ATP8B3 (+50281); chr19:1762516-1762580/ONECUT3 (+8886), ATP
8B3 (+49651); chr19:1763799-1763934/ONECUT3 (+10205), ATP8B3 (+48332); chr19:1767752-1767771/ONE
CUT3 (+14100), ATP8B3 (+44437); chr19:1776047-1776192/ONECUT3 (+22458), ATP8B3 (+36079); chr19:18
47545-1847608/REXO1 (+875); chr19:1852073-1852148/REXO1 (−3659); chr19:1855564-1855654/REXO1 (−71
57), KLF16 (+7955); chr19:1876485-1876538/KLF16 (−12948), FAM108A1 (+9006); chr19:1967240-1967300/C
SNK1G2 (+26109), BTBD2 (+48432); chr19:2051004-2051047/MKNK2 (+217); chr19:2091134-2091272/MKNK
2 (−39960), MOB3A (+5066); chr19:2094205-2094280/IZUMO4 (−2625), MOB3A (+2026); chr19:2095431-20954
75/IZUMO4 (−1415), MOB3A (+816); chr19:2095590-2095672/IZUMO4 (−1237), MOB3A (+638); chr19:2096242-
2096277/IZUMO4 (−608), MOB3A (+9); chr19:2163871-2163895/DOT1L (−265); chr19:2240021-2240148/AMH
(−9028), SF3A2 (+3269); chr19:2251465-2251600/AMH (+2420), JSRP1 (+4889); chr19:2252068-2252588/AMH
(+3215), JSRP1 (+4094); chr19:2253736-2253780/JSRP1 (+2664), AMH (+4645); chr19:2271647-2271691/AX
747191 (−18330), OAZ1 (+2149); chr19:2273018-2273069/AX747191 (−16955), OAZ1 (+3524); chr19:2282438-
2282512/AX747191 (−7524), OAZ1 (+12955); chr19:2288131-2288257/AX747191 (−1805); chr19:2289549-2289
652/AX747191 (−398); chr19:2290908-2290980/AX747191 (+945); chr19:2291204-2291262/AX747191 (+1234),
LINGO3 (+16923); chr19:2302355-2302510/LINGO3 (+5723), AX747191 (+12434); chr19:2307668-2307775/LI
NGO3 (+434); chr19:2360537-2360618/TMPRSS9 (−29206), SPPL2B (+31949); chr19:2360810-2360884/TMP
RSS9 (−28937), SPPL2B (+32218); chr19:2427390-2427536/TIMM13 (+412); chr19:2456351-2456388/LMNB2
(+588); chr19:2474663-2474702/GADD45B (−1440); chr19:2561966-2562006/GADD45B (+85863), GNG7 (+140
760); chr19:2599159-2599231/GNG7 (+103551), GADD45B (+123072); chr19:2634462-2634572/GNG7 (+6822
9), GADD45B (+158394); chr19:2720335-2720412/GNG7 (−17628), DIRAS1 (+1016); chr19:2776019-2776121/
SLC39A3 (−35996), SGTA (+7284); chr19:2782997-2783238/THOP1 (−2388), SGTA (+236); chr19:3068307-306
8362/GNA11 (−26073), AES (−5371); chr19:3094951-3095110/GNA11 (+623); chr19:3136454-3136613/GNA15
(+343); chr19:3136878-3136946/GNA15 (+721); chr19:3178636-3178758/S1PR4 (−39); chr19:3179238-317939
6/S1PR4 (+581); chr19:3179827-3180368/NCLN (−5777), S1PR4 (+1362); chr19:3285963-3285993/NFIC (−805
87), CELF5 (+61277); chr19:3359668-3359692/NFIC (−6885), CELF5 (+134979); chr19:3369713-3369824/NFIC
(+3204), C19orf77 (+110771); chr19:3444550-3444581/C19orf77 (+35974), NFIC (+78001); chr19:3478602-34
78649/C19orf77 (+1914), NFIC (+112061); chr19:3572643-3572717/HMG20B (−263); chr19:3586007-3586074/
HMG20B (+13098), TBXA2R (+20790); chr19:3605109-3605208/TBXA2R (+1672), HMG20B (+32216); chr19:3
607603-3607674/TBXA2R (−808); chr19:3608745-3608892/TBXA2R (−1988); chr19:3631667-3631701/C19orf29
(−4871); chr19:3670855-3670990/C19orf29 (−44110), PIP5K1C (+29554); chr19:3671129-3671270/C19orf29
(−44387), PIP5K1C (+29277); chr19:3671966-3672066/C19orf29 (−45203), PIP5K1C (+28461); chr19:3688096-36
88228/C19orf29 (−61349), PIP5K1C (+12315); chr19:3785836-3785864/MATK (+565); chr19:3801529-3801582/
MATK (−15141), ZFR2 (+67471); chr19:3822110-3822134/MATK (−35707), ZFR2 (+46905); chr19:3869061-386
9118/ZFR2 (−63); chr19:3950857-3950893/ITGB1BP3 (+17774), DAPK3 (+18952); chr19:3971205-3971241/DA
PK3 (−1396); chr19:4033606-4033631/PIAS4 (+25870), ZBTB7A (+33197); chr19:4108811-4108835/ZBTB7A
(−42007), MAP2K2 (+15303); chr19:4123839-4123861/MAP2K2 (+276); chr19:4182580-4182605/SIRT6 (+3); chr
19:4246869-4246926/EBI3 (+17358), TMIGD2 (+55530); chr19:4279432-4279567/TMIGD2 (+22928), EBI3 (+4
9960); chr19:4280137-4280205/TMIGD2 (+22257), EBI3 (+50631); chr19:4302370-4302488/FSD1 (−2162), TMI
GD2 (−1); chr19:4326945-4327048/STAP2 (+11944), FSD1 (+22406); chr19:4342483-4342537/STAP2 (−3569),
MPND (−1014); chr19:4457230-4457288/UBXN6 (+532); chr19:4474233-4474305/HDGFRP2 (+2014), PLIN4
(+43447); chr19:4543428-4543486/LRG1 (−3421); chr19:4543762-4543804/LRG1 (−3747); chr19:4597187-45972
71/SEMA6B (−37458), C19orf10 (+73186); chr19:4598616-4598627/SEMA6B (−38851), C19orf10 (+71793); chr
19:4636093-4636151/SEMA6B (−76351), C19orf10 (+34293); chr19:4639620-4639656/SEMA6B (−79867), C19o
rf10 (+30777); chr19:4759828-4759875/DPP9 (−35997), FEM1A (−31876); chr19:4792487-4792507/FEM1A (+7
69); chr19:4916710-4916766/KDM4B (−52386), UHRF1 (+7228); chr19:5293138-5293155/PTPRS (+47667), KD
M4B (+324023); chr19:5294142-5294320/PTPRS (+46583), KDM4B (+325107); chr19:5338851-5338900/PTPR
S (+1938), KDM4B (+369752); chr19:5492833-5492887/ZNRF4 (+37434), SAFB2 (+130078); chr19:5585894-5
586026/SAFB2 (+36978), ZNRF4 (+130534); chr19:5622666-5622693/SAFB (−366), SAFB2 (+258); chr19:5680
463-5680500/HSD11B1L (−553), C19orf70 (+429); chr19:5686452-5686523/RPL36 (−3784); chr19:5690293-569
0319/RPL36 (+34); chr19:5802059-5802154/NRTN (−21711), DUS3L (−10858); chr19:5805686-5805711/NRTN
(−18119), DUS3L (−14450); chr19:5829319-5829398/NRTN (+5541), FUT6 (+10383); chr19:5977738-5977760/R
ANBP3 (+571); chr19:6004057-6004120/RANBP3 (−25769), RFX2 (+106575); chr19:6199358-6199422/ACSBG
2 (+63680), MLLT1 (+80569); chr19:6234235-6234300/MLLT1 (+45691), ACSBG2 (+98558); chr19:6531889-65
31936/TNFSF9 (+903); chr19:6669868-6669932/TNFSF14 (+699); chr19:6697434-6697471/TNFSF14 (−26854),
C3 (+23209); chr19:6753408-6753474/TRIP10 (+13734), SH2D3A (+14082); chr19:6772929-6773034/VAV1
(+260); chr19:7660686-7660714/CAMSAP3 (−88); chr19:7795692-7795734/FCER2 (−28681), CLEC4G (+1344); c
hr19:7853471-7853543/EVI5L (−57875), CLEC4M (+25472); chr19:7853798-7853832/EVI5L (−57567), CLEC4M
(+25780); chr19:7854393-7854456/EVI5L (−56957), CLEC4M (+26390); chr19:7894895-7894988/EVI5L (−1644
0), CLEC4M (+66907); chr19:7927241-7927302/LRRC8E (−26118), EVI5L (+15890); chr19:7928186-7928218/L
RRC8E (−25188), EVI5L (+16820); chr19:7990570-7990605/CTXN1 (+463); chr19:8007957-8008005/TIMM44
(+727); chr19:8070415-8070435/ELAVL1 (+104); chr19:8115058-8115114/CCL25 (−2560); chr19:8174154-8174
232/FBN3 (+38188), CCL25 (+56547); chr19:8399364-8399386/ANGPTL4 (−29636), RPS28 (+12991); chr19:86
56851-8656878/MYO1F (−14534), ADAMTS10 (+18723); chr19:8657741-8657811/MYO1F (−15445), ADAMTS1
0 (+17812); chr19:8808638-8808678/ACTL9 (+514); chr19:9251152-9251198/ZNF317 (+119), ZNF317 (+119);
chr19:9473673-9473714/ZNF177 (−13298), ZNF559 (+39246); chr19:9517791-9517879/ZNF266 (+28399), ZNF
177 (+30843); chr19:9938334-9938365/UBL5 (−206); chr19:10011106-10011189/OLFM2 (+35922), PIN1 (+652
65); chr19:10023852-10024009/OLFM2 (+23139), PIN1 (+78048); chr19:10046402-10046485/OLFM2 (+626); c
hr19:10077277-10077381/OLFM2 (−30259), COL5A3 (+43818); chr19:10138460-10138479/RDH8 (+14545), AN
GPTL6 (+74955); chr19:10341570-10341586/S1PR2 (+370); chr19:10397993-10398074/ICAM5 (−2621), ICAM4
(+391); chr19:10406160-10406278/ICAM5 (+5564), ZGLP1 (+14014); chr19:10407030-10407044/ICAM5 (+638
2), ZGLP1 (+13196); chr19:10444571-10444632/RAVER1 (−288); chr19:10514195-10514233/CDC37 (+57); chr
19:10624540-10624739/KEAP1 (−10586), S1PR5 (+4028); chr19:10624853-10624965/KEAP1 (−10855), S1PR5
(+3759); chr19:10625667-10625744/KEAP1 (−11652), S1PR5 (+2962); chr19:10655591-10655652/ATG4D (+9
75); chr19:10765276-10765339/ILF3 (+371); chr19:10982658-10982685/CARM1 (+419); chr19:11201315-1120
1350/LDLR (+1295), SPC24 (+65151); chr19:11253444-11253491/SPC24 (+13016), LDLR (+53430); chr19:114
04716-11404771/TSPAN16 (−2080); chr19:11450155-11450197/RAB3D (+168); chr19:11492662-11492786/EP
OR (+2294), LPPR2 (+26662); chr19:11532109-11532262/RGL3 (−2168); chr19:11546874-11546927/PRKCSH
(+632); chr19:11591300-11591353/ELAVL3 (+476); chr19:11591639-11591672/ELAVL3 (+147); chr19:1161620
7-11616250/ZNF653 (+509); chr19:11750771-11750824/ZNF833P (−34015), ZNF627 (+42563); chr19:1178507
8-11785183/ZNF833P (+318); chr19:12306194-12306229/ZNF136 (+32340), ZNF44 (+99502); chr19:12405169-
12405217/ZNF44 (+521); chr19:12551424-12551485/ZNF443 (+471); chr19:12624211-12624546/ZNF709 (−28
747), ZNF490 (+97244); chr19:12777330-12777367/WDR83 (−3168), MAN2B1 (+242); chr19:12831700-128317
72/FBXW9 (−24281), TNPO2 (+1726); chr19:12832955-12832993/TNPO2 (+488); chr19:12833426-12833448/T
NPO2 (+25); chr19:12995814-12995851/DNASE2 (−3498); chr19:13056576-13056619/RAD23A (−56); chr19:13
121070-13121084/NFIX (+14493), LYL1 (+92897); chr19:13122878-13123062/NFIX (+16386), LYL1 (+91004);
chr19:13135414-13135524/NFIX (+28885), LYL1 (+78505); chr19:13207431-13207596/LYL1 (+6460), NFIX (+1
00930); chr19:13209980-13210136/LYL1 (+3916), NFIX (+103474); chr19:13210332-13210683/LYL1 (+3466),
NFIX (+103924); chr19:13213763-13213789/LYL1 (+198); chr19:13215314-13215525/LYL1 (−1446); chr19:136
17066-13617105/CACNA1A (+188); chr19:13617465-13617489/CACNA1A (−203); chr19:13885202-13885244/Z
SWIM4 (−21051), MRI1 (+9886); chr19:13950331-13950466/NANOS3 (−37664), ZSWIM4 (+44125); chr19:1395
3324-13953343/NANOS3 (−34729), ZSWIM4 (+47060); chr19:13958535-13958549/NANOS3 (−29521), ZSWIM4
(+52268); chr19:13961258-13961290/NANOS3 (−26789), ZSWIM4 (+55000); chr19:14089869-14089933/POD
NL1 (−25697), RFX1 (+27233); chr19:14097426-14097489/PODNL1 (−33254), RFX1 (+19676); chr19:14117881-
14117930/RFX1 (−772); chr19:14168207-14168214/PALM3 (+1760), IL27RA (+25949); chr19:14192300-14192
325/PALM3 (−22342), SAMD1 (+8919); chr19:14247632-14247660/ASF1B (−206); chr19:14278532-14278664/A
SF1B (−31158), LPHN1 (+38399); chr19:14317680-14317696/LPHN1 (−691); chr19:14474148-14474179/LPHN1
(−157167), CD97 (−17792); chr19:14492401-14492435/CD97 (+462); chr19:14530064-14530104/DDX39A (+11
1); chr19:14583516-14583613/PTGER1 (+2609), PKN1 (+32479); chr19:14584073-14584167/PTGER1 (+2054),
PKN1 (+33034); chr19:14584413-14584536/PTGER1 (+1699), PKN1 (+33389); chr19:14591052-14591075/PT
GER1 (−4890); chr19:14628992-14629016/DNAJB1 (+197); chr19:14886771-14886822/EMR2 (+2556), ZNF333
(+85927); chr19:15090729-15090745/CCDC105 (−30802), SLC1A6 (−7008); chr19:15127161-15127234/CASP1
4 (−33093), CCDC105 (+5659); chr19:15344131-15344417/EPHX3 (−1043); chr19:15442261-15442303/BRD4
(−51020), AKAP8 (+48330); chr19:15528952-15528973/AKAP8L (+870); chr19:15580347-15580771/RASAL3 (−5
177), PGLYRP2 (+9756); chr19:15739954-15740083/CYP4F3 (−11688), CYP4F8 (+13990); chr19:15982551-15
982652/OR10H1 (−63666), CYP4F2 (+26282); chr19:16187620-16187640/RAB8A (−34860), TPM4 (+9313); chr
19:16197083-16197202/RAB8A (−25347), TPM4 (+18826); chr19:16222445-16222493/RAB8A (−21); chr19:163
69409-16369462/KLF2 (−66215), AP1M1 (+60771); chr19:16394456-16394556/KLF2 (−41145), AP1M1 (+85841);
chr19:16435975-16435992/KLF2 (+333); chr19:16482436-16482469/KLF2 (+46802), EPS15L1 (+100309); ch
r19:16682841-16682863/SLC35E1 (+341); chr19:16683258-16683295/SLC35E1 (−84); chr19:16738793-167388
14/MED26 (+211); chr19:16940139-16940173/SIN3B (−53); chr19:16999952-17000071/F2RL3 (+186); chr19:17
007389-17007446/F2RL3 (+7592), CPAMD8 (+130207); chr19:17137359-17137395/CPAMD8 (+248); chr19:17
246401-17246457/USE1 (−79726), MYO9B (+59838); chr19:17438895-17438948/ANO8 (+6716), MRPL34 (+22
445); chr19:17439194-17439331/ANO8 (+6375), MRPL34 (+22786); chr19:17439540-17439835/ANO8 (+5950),
MRPL34 (+23211); chr19:17439959-17439993/ANO8 (+5662), MRPL34 (+23499); chr19:17501970-17501993/
PLVAP (−13845), BST2 (+14402); chr19:17502553-17502609/PLVAP (−14444), BST2 (+13803); chr19:1756649
9-17566700/TMEM221 (−7224), NXNL1 (+5125); chr19:17622330-17622393/PGLS (−70); chr19:17634138-1763
4201/GLT25D1 (−32341), PGLS (+11738); chr19:17666922-17666974/GLT25D1 (+437); chr19:17798734-1779
8754/UNC13A (+306); chr19:17858844-17858872/B3GNT3 (−47061), MAP1S (+28555); chr19:17876020-17876
076/B3GNT3 (−29871), MAP1S (+45745); chr19:17889490-17889636/B3GNT3 (−16356), MAP1S (+59260); chr1
9:17983669-17983723/SLC5A5 (+914); chr19:18060544-18060571/KCNN1 (−1553); chr19:18061575-18061639/
KCNN1 (−504); chr19:18113542-18113567/KCNN1 (+51444), IL12RB1 (+84187); chr19:18118908-18118965/K
CNN1 (+56826), IL12RB1 (+78805); chr19:18119523-18119551/KCNN1 (+57426), IL12RB1 (+78205); chr19:18
314548-18314584/RAB3A (+308); chr19:18334731-18334784/RAB3A (−19884), PDE4C (+24252); chr19:18337
332-18337346/RAB3A (−22465), PDE4C (+21671); chr19:18343810-18343879/RAB3A (−28971), PDE4C (+1516
5); chr19:18391619-18391642/JUND (+801); chr19:18402146-18402257/JUND (−9770), LSM4 (+31799); chr19:
18539804-18539933/ISYNA1 (+9242), SSBP4 (+9723); chr19:18543840-18544012/ISYNA1 (+5185), SSBP4
(+13780); chr19:18544272-18544418/ISYNA1 (+4766), SSBP4 (+14199); chr19:18544723-18544734/ISYNA1 (+4
382), SSBP4 (+14583); chr19:18544845-18544891/ISYNA1 (+4243), SSBP4 (+14722); chr19:18654616-18654
640/FKBP8 (−245); chr19:18714581-18714789/CRLF1 (+2975), C19orf60 (+15190); chr19:18715082-18715120/
CRLF1 (+2559), C19orf60 (+15606); chr19:18722358-18722386/CRLF1 (−4712), TMEM59L (−1310); chr19:1872
2489-18722521/CRLF1 (−4845), TMEM59L (−1177); chr19:18723397-18723427/TMEM59L (−270); chr19:187248
38-18724917/CRTC1 (−69547), TMEM59L (+1196); chr19:18746969-18746991/CRTC1 (−47445), TMEM59L (+2
3298); chr19:18760846-18761118/CRTC1 (−33443), TMEM59L (+37300); chr19:18770245-18770327/CRTC1
(−24139), TMEM59L (+46604); chr19:18898233-18898314/COMP (+3840), CRTC1 (+103849); chr19:18980718-1
8980882/CERS1 (+26153), UPF1 (+38056); chr19:18981254-18981331/CERS1 (+25660), UPF1 (+38549); chr1
9:18981445-18981474/CERS1 (+25493), UPF1 (+38716); chr19:19030746-19030772/COPE (−560), DDX49 (+2
75); chr19:19174421-19174575/SLC25A42 (−305); chr19:19175238-19175260/SLC25A42 (+446); chr19:192214
08-19221464/TMEM161A (+27831), SLC25A42 (+46633); chr19:19372277-19372329/HAPLN4 (+1348), NCAN
(+49521); chr19:19571724-19571750/TSSK6 (+54732), GATAD2A (+75095); chr19:19650551-19650621/CILP2
(+1512), PBX4 (+79139); chr19:19650916-19651027/CILP2 (+1898), PBX4 (+78753); chr19:19651482-196515
12/CILP2 (+2423), PBX4 (+78228); chr19:19651848-19651990/CILP2 (+2845), PBX4 (+77806); chr19:1972953
0-19729585/PBX4 (+167); chr19:19779479-19779530/ZNF101 (−158); chr19:19971773-19971821/ZNF253 (−49
17); chr19:20606299-20606342/ZNF737 (+142305), ZNF486 (+328238); chr19:20847386-20847485/ZNF626
(−3034); chr19:21580157-21580233/ZNF493 (+274); chr19:21646534-21646606/ZNF429 (−41867), ZNF493 (+66
649); chr19:21657903-21657922/ZNF429 (−30524), ZNF493 (+77992); chr19:21769375-21769579/ZNF429 (+8
1040), ZNF100 (+180953); chr19:22034422-22034446/ZNF43 (−15464), ZNF208 (+159311); chr19:22072938-2
2073021/ZNF43 (−54010), ZNF208 (+120765); chr19:22235624-22235695/ZNF257 (+394); chr19:22604824-22
604860/ZNF98 (+306); chr19:22610701-22610862/ZNF492 (−206344), ZNF98 (−5634); chr19:22611190-226112
41/ZNF492 (−205910), ZNF98 (−6068); chr19:22611467-22611555/ZNF492 (−205615), ZNF98 (−6363); chr19:22
702467-22702527/ZNF492 (−114629), ZNF98 (−97349); chr19:22800786-22800846/ZNF98 (−195668), ZNF492
(−16310); chr19:22805769-22805823/ZNF98 (−200648), ZNF492 (−11330); chr19:22806056-22806297/ZNF98 (−2
01029), ZNF492 (−10949); chr19:22966638-22966705/ZNF99 (+301); chr19:22990247-22990300/ZNF99 (−2330
1), ZNF724P (+442898); chr19:22990460-22990568/ZNF99 (−23541), ZNF724P (+442658); chr19:23185657-23
185693/ZNF99 (−218702), ZNF724P (+247497); chr19:23185843-23186034/ZNF99 (−218966), ZNF724P (+247
233); chr19:23253201-23253315/ZNF99 (−286285), ZNF724P (+179914); chr19:23253888-23254114/ZNF99 (−2
87028), ZNF724P (+179171); chr19:23258008-23258305/ZNF99 (−291184), ZNF724P (+175015); chr19:233001
54-23300232/ZNF99 (−333220), ZNF724P (+132979); chr19:23386783-23387051/ZNF99 (−419944), ZNF724P
(+46255); chr19:23432962-23433023/ZNF724P (+179); chr19:23654080-23654103/ZNF91 (−75823), ZNF675
(+215925); chr19:23946108-23946126/ZNF681 (−4424), RPSA (+301); chr19:29218551-29218616/UQCRFS1 (+4
85552); chr19:29284317-29284329/UQCRFS1 (+419813); chr19:29284583-29284915/UQCRFS1 (+419387); ch
r19:29703991-29704027/UQCRFS1 (+127); chr19:30015963-30016024/VSTM2B (−1497); chr19:30016935-300
17014/VSTM2B (−516); chr19:30017510-30017577/VSTM2B (+53); chr19:30017722-30017765/VSTM2B (+253);
chr19:30019611-30019660/POP4 (−77534), VSTM2B (+2145); chr19:30019931-30019993/POP4 (−77208), VS
TM2B (+2471); chr19:30021039-30021252/POP4 (−76024), VSTM2B (+3655); chr19:30205890-30205915/C19o
rf12 (+60); chr19:30363476-30363523/URI1 (−69646), CCNE1 (+60599); chr19:30713593-30713685/ZNF536
(−149689), URI1 (+280493); chr19:30716770-30716952/ZNF536 (−146467), URI1 (+283715); chr19:30866272-30
866452/ZNF536 (+3034), TSHZ3 (+973828); chr19:31839644-31839675/TSHZ3 (+530); chr19:31839928-31839
941/TSHZ3 (+255); chr19:31842489-31842530/TSHZ3 (−2320); chr19:31842672-31842828/TSHZ3 (−2560); chr
19:31842964-31843033/TSHZ3 (−2809); chr19:31844884-31844953/TSHZ3 (−4729); chr19:31845488-31845580/
ZNF507 (−990980), TSHZ3 (−5344); chr19:32715258-32715442/TSHZ3 (−875160), ZNF507 (−121164); chr19:33
165568-33165621/RGS9BP (−718), ANKRD27 (+507); chr19:33166969-33166988/ANKRD27 (−877), RGS9BP
(+666); chr19:33167488-33167496/ANKRD27 (−1390), RGS9BP (+1179); chr19:33462717-33462754/C19orf40
(−412), CEP89 (+133); chr19:33625776-33625803/LRP3 (−59809), GPATCH1 (+54004); chr19:33717909-337179
38/SLC7A10 (−1168); chr19:33740342-33740428/SLC7A10 (−23629), CEBPA (+53045); chr19:33794745-33794
779/CEBPA (−1332); chr19:34112287-34112326/CHST8 (−554); chr19:34113303-34113366/CHST8 (+474); chr1
9:34114050-34114286/KCTD15 (−173583), CHST8 (+1307); chr19:34288989-34289043/LSM14A (−374336), KC
TD15 (+1265); chr19:34311907-34311954/LSM14A (−351421), KCTD15 (+24180); chr19:34745977-34745998/
GPI (−110044), LSM14A (+82636); chr19:34972006-34972067/WTIP (−843); chr19:34972364-34972522/WTIP
(−437); chr19:34972648-34972675/WTIP (−218); chr19:34973124-34973242/WTIP (+303); chr19:34973457-3497
3553/WTIP (+625); chr19:34991198-34991282/WTIP (+18360), SCGB2B2 (+94250); chr19:34991497-3499158
0/WTIP (+18659), SCGB2B2 (+93951); chr19:35068424-35068601/SCGB2B2 (+16977), WTIP (+95633); chr19:
35395949-35396250/ZNF599 (−131966), ZNF30 (−21707); chr19:35600660-35600733/FXYD3 (−6035), HPN (+6
9287); chr19:35634335-35634415/FXYD7 (+221); chr19:36049368-36049396/ATP4A (+5178), TMEM147 (+128
80); chr19:36134526-36134593/COX6B1 (−4565); chr19:36208105-36208151/MLL4 (−793); chr19:36208350-36
208402/MLL4 (−545); chr19:36208605-36208640/MLL4 (−298); chr19:36231248-36231295/IGFLR1 (+2248), ML
L4 (+22351); chr19:36231513-36231553/PSENEN (−4961), IGFLR1 (+1987); chr19:36247183-36247230/HSPB
6 (+723); chr19:36247540-36247595/HSPB6 (+362); chr19:36247848-36247941/HSPB6 (+35); chr19:36319708-
36319779/PRODH2 (−15543), NPHS1 (+23151); chr19:36351456-36351528/APLP1 (−7909), KIRREL2 (+3682);
chr19:36390629-36390661/HCST (−2737), NFKBID (+907); chr19:36450296-36450544/SDHAF1 (−35670), LRF
N3 (+22398); chr19:36544819-36544859/WDR62 (−944), THAP8 (+825); chr19:36545415-36545479/WDR62 (−3
36), THAP8 (+217); chr19:36618842-36618901/POLR2I (−12666), CAPNS1 (−12046); chr19:36631054-3663112
1/CAPNS1 (+170); chr19:36705492-36705546/ZNF146 (+15), ZNF565 (+47); chr19:36736296-36736314/ZNF5
65 (−30739), ZFP14 (+133800); chr19:36736599-36736765/ZNF565 (−31116), ZFP14 (+133423); chr19:367484
83-36748502/ZNF565 (−42927), ZFP14 (+121612); chr19:36822467-36822557/ZNF565 (−116946), ZFP14 (+47
593); chr19:36909349-36909623/ZFP82 (+64); chr19:36912350-36912480/ZFP82 (−2865); chr19:37095813-370
96219/ZNF382 (−205); chr19:37157196-37157284/ZNF461 (+499); chr19:37288425-37288606/ZNF850 (−24800),
ZNF790 (+53173); chr19:37329389-37329447/ZNF850 (−65702), ZNF790 (+12271); chr19:37341102-373411
65/ZNF345 (−644), ZNF790 (+555); chr19:37464568-37464666/ZNF420 (−104765), ZNF568 (+57386); chr19:37
498730-37498799/ZNF420 (−70617), ZNF568 (+91534); chr19:37742793-37742848/HKR1 (−82759), ZNF383
(+25455); chr19:37861691-37861741/ZNF527 (−343); chr19:37959801-37959873/ZNF569 (−1498), ZNF570 (−145);
chr19:38042137-38042352/ZNF540 (−28); chr19:38182960-38183111/ZNF781 (+180); chr19:38210158-38210
326/ZNF607 (+449); chr19:38307920-38307977/SIPA1L3 (−89919), ZNF573 (−37719); chr19:38308337-383083
94/SIPA1L3 (−89502), ZNF573 (−38136); chr19:38346077-38346133/ZNF573 (−75875), SIPA1L3 (−51763); chr1
9:38700454-38700504/DPF1 (+14411), SIPA1L3 (+302611); chr19:38747078-38747106/PPP1R14A (+139); chr
19:38806608-38806627/KCNK6 (−3866), YIF1B (−12); chr19:38877455-38877688/SPRED3 (−3367), GGN (+109
6); chr19:38885341-38885383/SPRED3 (+4423), RASGRP4 (+31583); chr19:38886153-38886348/SPRED3 (+5
312), RASGRP4 (+30694); chr19:38886518-38886739/SPRED3 (+5690), RASGRP4 (+30316); chr19:39056352-
39056367/MAP4K1 (+52283), RYR1 (+132020); chr19:39228135-39228177/CAPN12 (+6958), ACTN4 (+89889);
chr19:39260649-39260751/CAPN12 (−25586), LGALS7 (+3457); chr19:39260917-39260984/CAPN12 (−25837),
LGALS7 (+3206); chr19:39261270-39261342/CAPN12 (−26192), LGALS7 (+2851); chr19:39261605-3926171
7/CAPN12 (−26547), LGALS7 (+2496); chr19:39282654-39282726/LGALS7B (+2840), LGALS4 (+21050); chr19:
39283038-39283060/LGALS7B (+3199), LGALS4 (+20691); chr19:39283577-39283611/LGALS7B (+3744), LG
ALS4 (+20146); chr19:39342695-39342707/HNRNPL (−2084); chr19:39360177-39360270/HNRNPL (−19607), R
INL (+8695); chr19:39360489-39360564/HNRNPL (−19910), RINL (+8392); chr19:39390038-39390193/NFKBIB
(−454), SIRT2 (+386); chr19:39574805-39574877/PAPL (−104); chr19:39589237-39589265/PAK4 (−27169), PAP
L (+14306); chr19:39589561-39589679/PAK4 (−26800), PAPL (+14675); chr19:39687647-39687755/NCCRP1
(+97); chr19:39738310-39738521/IL28B (−2807); chr19:39755233-39755264/IL28A (−3908); chr19:39755665-39
755753/IL28A (−3448); chr19:39756043-39756095/IL28A (−3088); chr19:39826508-39826667/GMFG (+138); chr
19:39898366-39898405/ZFP36 (+899); chr19:39926841-39926903/RPS16 (−254); chr19:39936031-39936090/S
UPT5H (−125); chr19:39993657-39993711/SELV (−12069), DLL3 (+4127); chr19:39997733-39997748/SELV (−8
012), DLL3 (+8184); chr19:39998254-39998331/SELV (−7460), DLL3 (+8736); chr19:40006161-40006186/SELV
(+421); chr19:40006448-40006498/SELV (+720); chr19:40502617-40502695/ZNF546 (−287); chr19:40596645-
40596689/ZNF780A (+178); chr19:40732304-40732335/CNTD2 (+277); chr19:40780593-40780656/CNTD2 (−4
8028), AKT2 (+10677); chr19:40854189-40854239/PLD3 (−118); chr19:40854803-40854836/PLD3 (+488); chr1
9:40904669-40904701/HIPK4 (−8591), PRX (+14586); chr19:41019063-41019075/SHKBP1 (−63688), SPTBN4
(+45943); chr19:41060385-41060498/SHKBP1 (−22315), SPTBN4 (+87316); chr19:41073858-41074018/SHKBP
1 (−8819), SPTBN4 (+100812); chr19:41076342-41076403/SHKBP1 (−6384), SPTBN4 (+103247); chr19:411030
38-41103133/LTBP4 (−55); chr19:41116417-41116513/LTBP4 (+13324), NUMBL (+80091); chr19:41119277-41
119370/LTBP4 (+16183), NUMBL (+77232); chr19:41119802-41120262/LTBP4 (+16891), NUMBL (+76524); ch
r19:41283765-41283840/RAB4B (−321); chr19:41316613-41316675/EGLN2 (+11310), CYP2A6 (+39708); chr19:
41317184-41317260/EGLN2 (+11888), CYP2A6 (+39130); chr19:41354455-41354575/CYP2A6 (+1837), EGL
N2 (+49181); chr19:41596042-41596078/CYP2F1 (−24293), CYP2A13 (+1692); chr19:41641363-41641382/CY
P2S1 (−57742), CYP2F1 (+21020); chr19:41641980-41642001/CYP2S1 (−57124), CYP2F1 (+21638); chr19:421
50687-42150720/CEACAM4 (−17262), CEACAM7 (+41392); chr19:42364210-42364261/RPS19 (+248); chr19:4
2426880-42427015/RABAC1 (+36580), ARHGEF1 (+38502); chr19:42432047-42432081/RABAC1 (+31464), A
RHGEF1 (+43618); chr19:42445124-42445145/RABAC1 (+18393), ARHGEF1 (+56689); chr19:42502730-4250
2763/ATP1A3 (−4365); chr19:42502938-42502971/ATP1A3 (−4573); chr19:42503259-42503323/ATP1A3 (−4909);
chr19:42573146-42573251/GRIK5 (−3242); chr19:42681161-42681174/POU2F2 (−44543), DEDD2 (+40645);
chr19:42703550-42703641/POU2F2 (−66971), DEDD2 (+18217); chr19:42759335-42759445/ERF (−81); chr19:4
2772451-42772478/CIC (−16352), ERF (−13156); chr19:42772908-42772963/CIC (−15881), ERF (−13627); chr19:
42785219-42785283/CIC (−3566); chr19:42827820-42827981/MEGF8 (−1860); chr19:42828085-42828316/ME
GF8 (−1560); chr19:44084626-44084701/XRCC1 (−4934), LOC390940 (+3712); chr19:44258703-44258747/SM
G9 (+417); chr19:44331152-44331205/ZNF283 (−294); chr19:44905714-44905766/ZFP112 (−44884), ZNF229
(+46925); chr19:45256824-45256856/CBLC (−24286), BCL3 (+4862); chr19:45351049-45351096/TOMM40 (−434
04), PVRL2 (+1680); chr19:45394085-45394133/TOMM40 (−368); chr19:45447143-45447219/CLPTM1 (−11418),
APOC1 (+29260); chr19:45596303-45596354/GEMIN7 (+13811), NKPD1 (+67079); chr19:45608019-456080
68/GEMIN7 (+25526), NKPD1 (+55364); chr19:45655349-45655399/NKPD1 (+8034), GEMIN7 (+72856); chr19:
45655557-45655647/NKPD1 (+7806), GEMIN7 (+73084); chr19:45656743-45656790/NKPD1 (+6641), GEMIN7
(+74249); chr19:45662231-45662397/NKPD1 (+1094), GEMIN7 (+79796); chr19:45681470-45681509/BLOC1
S3 (−513), TRAPPC6A (−5); chr19:45681956-45681986/TRAPPC6A (−486), BLOC1S3 (−32); chr19:45719075-45
719136/EXOC3L2 (+18363), BLOC1S3 (+37103); chr19:45752201-45752240/MARK4 (−2295), MARK4 (−2295);
chr19:45754356-45754373/MARK4 (−151), MARK4 (−151); chr19:45889225-45889315/ERCC2 (−15425), PPP1R
13L (+19042); chr19:45899742-45899782/ERCC2 (−25917), PPP1R13L (+8550); chr19:45899960-45899995/E
RCC2 (−26133), PPP1R13L (+8334); chr19:45901452-45901492/ERCC2 (−27627), PPP1R13L (+6840); chr19:4
5976065-45976122/FOSB (+4841), RTN2 (+24219); chr19:45996371-45996469/RTN2 (+3893), FOSB (+25167);
chr19:45999767-45999789/PPM1N (−1953), RTN2 (+535); chr19:46000092-46000121/PPM1N (−1624), RTN2
(+206); chr19:46002353-46002431/RTN2 (−2079), PPM1N (+661); chr19:46088063-46088101/OPA3 (+40); chr1
9:46105355-46105395/GPR4 (+91); chr19:46145506-46145557/GPR4 (−40066), EML2 (+3243); chr19:4617187
1-46171944/GIPR (+406); chr19:46184807-46184845/SNRPD2 (+10617), GIPR (+13324); chr19:46195058-461
95120/QPCTL (−652), SNRPD2 (+354); chr19:46195512-46195550/QPCTL (−210), SNRPD2 (−88); chr19:46282
589-46282650/SIX5 (−10123), DMPK (+3195); chr19:46283079-46283125/SIX5 (−10605), DMPK (+2713); chr19:
46312722-46312846/DMWD (−16724), RSPH6A (+5821); chr19:46318386-4631 8438/RSPH6A (+193); chr19:4
6318900-46318943/RSPH6A (−317); chr19:46319071-46319162/RSPH6A (−512); chr19:46319312-46319377/R
SPH6A (−740); chr19:46366230-46366249/FOXA3 (−1278), SYMPK (+308); chr19:46379858-46379893/IRF2BP
1 (+9500), FOXA3 (+12358); chr19:46380427-46380471/IRF2BP1 (+8927), FOXA3 (+12931); chr19:46390078-
46390100/IRF2BP1 (−713); chr19:46405983-46406033/MYPOP (−146); chr19:46477060-46477118/NOVA2 (−43
2); chr19:46526046-46526090/PGLYRP1 (+488); chr19:46526198-46526289/PGLYRP1 (+312); chr19:4677440
7-46774485/HIF3A (−25857), IGFL1 (+41437); chr19:46800317-46800353/HIF3A (+32); chr19:46916988-46917
060/CCDC8 (−105); chr19:46974609-46974831/CCDC8 (−57801), LOC100506012 (+129737); chr19:46993261-
46993281/CCDC8 (−76352), LOC100506012 (+111186); chr19:46996515-46996577/CCDC8 (−79627), LOC100
506012 (+107911); chr19:46996848-46996886/CCDC8 (−79948), LOC100506012 (+107590); chr19:46997147-4
6997221/CCDC8 (−80265), LOC100506012 (+107273); chr19:46997506-46997786/CCDC8 (−80727), LOC1005
06012 (+106811); chr19:47152024-47152061/GNG8 (−14104), PRKD2 (+68341); chr19:47152447-47152977/G
NG8 (−14773), PRKD2 (+67672); chr19:47164200-47164236/GNG8 (−26279), PRKD2 (+56166); chr19:4726001
2-47260071/STRN4 (−10322), SLC1A5 (+31800); chr19:47358909-47358941/AP2S1 (−4722); chr19:47363403-4
7363474/ARHGAP35 (−58494), AP2S1 (−9236); chr19:47507442-47507572/NPAS1 (−16636), ARHGAP35 (+855
74); chr19:47615994-47616025/ZC3H4 (+999); chr19:47729824-47729850/BBC3 (+6186), SAE1 (+95757); chr
19:47733984-47734047/BBC3 (+2007), SAE1 (+99936); chr19:47734187-47734361/BBC3 (+1749), SAE1 (+10
0194); chr19:47742557-47742701/PRR24 (−35513), BBC3 (−6606); chr19:47778625-47778738/PRR24 (+540); c
hr19:47910584-47910679/MEIS3 (+12153), DHX34 (+58094); chr19:47950313-47950337/MEIS3 (−27540), SLC
8A2 (+24982); chr19:47960586-47960799/MEIS3 (−37908), SLC8A2 (+14614); chr19:47987585-47987618/KPT
N (−81); chr19:48018184-48018253/NAPA (+296); chr19:48048438-48048617/NAPA (−30013), ZNF541 (+10585);
chr19:48048750-48048810/NAPA (−30265), ZNF541 (+10333); chr19:48111580-48111632/GLTSCR1 (+153);
chr19:48113644-48113681/EHD2 (−102938), GLTSCR1 (+2210); chr19:48233417-48233533/GLTSCR2 (−15318),
EHD2 (+16874); chr19:48565268-48565308/CABP5 (−17977), PLA2G4C (+48821); chr19:48625550-4862567
2/PLA2G4C (−11502), LIG1 (+47949); chr19:48866703-48866749/SYNGR4 (−925), TMEM143 (+460); chr19:488
67292-48867354/SYNGR4 (−328), TMEM143 (−137); chr19:48919031-48919305/GRWD1 (−29862), GRIN2D (+2
1036); chr19:48946056-48947271/GRWD1 (−2366); chr19:48947478-48947634/GRWD1 (−1474); chr19:489477
76-48947874/GRWD1 (−1205); chr19:48983734-48983933/CYTH2 (+11369), LMTK3 (+32612); chr19:48984139-
48984222/CYTH2 (+11716), LMTK3 (+32265); chr19:49217489-49217526/MAMSTR (+5468), FUT2 (+18280);
chr19:49223903-49223950/MAMSTR (−951); chr19:49242374-49242393/MAMSTR (−19408), RASIP1 (+1586); c
hr19:49242808-49242911/MAMSTR (−19884), RASIP1 (+1110); chr19:49243237-49243285/RASIP1 (+709); chr
19:49250408-49250538/IZUMO1 (−307); chr19:49263884-49263907/FGF21 (+4748), BCAT2 (+50424); chr19:4
9339610-49339737/HSD17B14 (+260); chr19:49340491-49340573/HSD17B14 (−598); chr19:49340710-493407
52/HSD17B14 (−797); chr19:49469254-49469315/FTL (+719); chr19:49560015-49560066/CGB8 (−7673), NTF4
(+7078); chr19:49575539-49575596/KCNA7 (+630); chr19:49575744-49575764/KCNA7 (+444); chr19:4957609
3-49576122/KCNA7 (+90); chr19:49622965-49623031/PPFIA3 (+335); chr19:49623140-49623172/PPFIA3 (+49
3); chr19:49646116-49646245/HRC (+12500), PPFIA3 (+23518); chr19:49649245-49649464/HRC (+9326), PP
FIA3 (+26692); chr19:49867327-49867385/TEAD2 (−1642), DKKL1 (+314); chr19:49931772-49931792/PTH2
(−5084), SLC17A7 (+13026); chr19:49931951-49932009/PTH2 (−5282), SLC17A7 (+12828); chr19:49935544-499
35586/PTH2 (−8867), SLC17A7 (+9243); chr19:49936785-49936827/PTH2 (−10108), SLC17A7 (+8002); chr19:4
9945536-49945605/SLC17A7 (−763); chr19:49946528-49946538/SLC17A7 (−1725); chr19:50036568-50036596/
RCN3 (+5707), NOSIP (+47221); chr19:50037155-50037219/RCN3 (+6312), NOSIP (+46616); chr19:50037655-
50037688/RCN3 (+6797), NOSIP (+46131); chr19:50058165-50058236/NOSIP (+25602), RCN3 (+27326); chr
19:50193234-50193245/CPT1C (−1125); chr19:50312767-50312888/FUZ (+3739), AP2A1 (+42648); chr19:503
53970-50354016/PTOV1 (−423); chr19:50373419-50373487/PNKP (−2631); chr19:50393408-50393536/IL4I1
(+6675), TBC1D17 (+12790); chr19:50432390-50432411/ATF5 (+1), NUP62 (+398); chr19:50432694-50432746/N
UP62 (+79), ATF5 (+320); chr19:50651248-50651307/IZUMO2 (+15260), ZNF473 (+122066); chr19:50666291-
50666298/IZUMO2 (+243); chr19:50707082-50707093/MYH14 (+203); chr19:50833233-50833282/KCNC3 (−62
4); chr19:50861814-50861946/NAPSB (−13875), NAPSA (+7051); chr19:50931514-50931536/MYBPC2 (−4635);
chr19:51014339-51014427/JOSD2 (−38); chr19:51069359-51069402/ASPDH (−52239), LRRC4B (+1921); chr1
9:51071637-51071706/LRRC4B (−370); chr19:51109404-51109485/LRRC4B (−38143), SYT3 (+33647); chr19:5
1142579-51142587/SYT3 (+509); chr19:51142758-51142834/SYT3 (+296); chr19:51162254-51162333/SYT3
(−19202), SHANK1 (+57901); chr19:51169771-51169933/SYT3 (−26760), SHANK1 (+50343); chr19:51170295-51
170382/SYT3 (−27247), SHANK1 (+49856); chr19:51170738-51170905/SYT3 (−27730), SHANK1 (+49373); chr
19:51171276-51171642/SYT3 (−28367), SHANK1 (+48736); chr19:51171861-51171949/SYT3 (−28813), SHANK
1 (+48290); chr19:51189966-51190018/SYT3 (−46900), SHANK1 (+30203); chr19:51198124-51198175/SYT3
(−55058), SHANK1 (+22045); chr19:51228269-51228368/GPR32 (−45539), CLEC11A (+1714); chr19:51228639-5
1228702/GPR32 (−45187), CLEC11A (+2066); chr19:51307186-51307242/ACPT (+13542), KLK1 (+19829); chr
19:51307554-51307566/ACPT (+13888), KLK1 (+19483); chr19:51569547-51569691/KLK13 (−1252); chr19:516
70785-51670859/CD33 (−57513), SIGLEC7 (+25264); chr19:51714343-51714438/CD33 (−13944), SIGLEC7 (+6
8833); chr19:51831003-51831120/VSIG10L (+14316), IGLON5 (+15960); chr19:51924565-51924703/SIGLEC1
0 (−3577); chr19:51966521-51966591/SIGLEC8 (−4848); chr19:52097948-52097998/FLJ30403 (−340); chr19:52
104579-52104609/FLJ30403 (−6961), SIGLEC5 (+29133); chr19:52104728-52104759/FLJ30403 (−7111), SIGL
EC5 (+28983); chr19:52206607-52206801/SIGLEC14 (−56572), HAS1 (+20517); chr19:52222938-52223075/SI
GLEC14 (−72875), HAS1 (+4214); chr19:52452336-52452494/ZNF613 (+21727), ZNF350 (+37664); chr19:5248
9213-52489320/ZNF350 (+812); chr19:52489710-52489782/ZNF350 (+333); chr19:52773079-52773134/ZNF76
6 (+283); chr19:52839718-52839741/ZNF610 (+232); chr19:52873534-52873570/ZNF880 (+382); chr19:52901
116-52901156/ZNF528 (+15); chr19:52954612-52954625/ZNF578 (−2210); chr19:52954739-52954786/ZNF578
(−2066); chr19:52957112-52957230/ZNF578 (+342); chr19:52996162-52996250/ZNF808 (−34703), ZNF578 (+3
9377); chr19:52996474-52996553/ZNF808 (−34395), ZNF578 (+39685); chr19:53030735-53030790/ZNF808 (−1
46); chr19:53031571-53031592/ZNF808 (+673); chr19:53039077-53039202/ZNF701 (−34777), ZNF808 (+8231);
chr19:53039903-53039918/ZNF701 (−34006), ZNF808 (+9002); chr19:53073241-53073313/ZNF701 (−640); ch
r19:53073773-53073819/ZNF701 (−121); chr19:53141619-53141647/ZNF83 (+11); chr19:53324277-53324326/
ZNF28 (+620); chr19:53496787-53496813/ZNF816 (−30636), AK127846 (−13965); chr19:53540895-53541103/E
RVV-2 (−6992), ERVV-1 (+23655); chr19:53635764-53635784/ZNF415 (+399); chr19:53832402-53832437/ZNF
845 (−4582); chr19:53836912-53836953/ZNF845 (−69); chr19:53837218-53837281/ZNF845 (+248); chr19:5386
9350-53869376/ZNF525 (+395); chr19:53966539-53966563/ZNF813 (−4438); chr19:53966724-53966788/ZNF8
13 (−4233); chr19:53971040-53971109/ZNF813 (+86); chr19:54372624-54372682/PRKCG (−12814), MYADM
(+3042); chr19:54393162-54393191/CACNG7 (−22814), PRKCG (+7710); chr19:54412749-54412808/CACNG7
(−3212); chr19:54412992-54413008/CACNG7 (−2991); chr19:54445297-54445558/CACNG8 (−20862), CACNG7
(+29437); chr19:54481438-54481540/CACNG6 (−14053), CACNG8 (+15199); chr19:54483306-54483364/CACN
G6 (−12207), CACNG8 (+17045); chr19:54485647-54485672/CACNG6 (−9882), CACNG8 (+19370); chr19:5448
5997-54486106/CACNG6 (−9490), CACNG8 (+19762); chr19:54600172-54600225/TARM1 (−15565), OSCAR
(+4043); chr19:54606665-54606697/OSCAR (−2439), OSCAR (−2439), NDUFA3 (+521); chr19:54640384-546404
52/CNOT3 (−1018); chr19:54641467-54641603/CNOT3 (+99); chr19:54890155-54890204/TTYH1 (−36425), LAI
R1 (−13459); chr19:54895995-54896056/TTYH1 (−30579), LAIR1 (−19305); chr19:54900316-54900370/TTYH1
(−26262), LAIR1 (−23622); chr19:54926492-54926520/TTYH1 (−99); chr19:54929363-54929429/LENG8 (−30669),
TTYH1 (+2791); chr19:54941761-54941850/LENG8 (−18259), TTYH1 (+15201); chr19:54976257-54976536/LE
NG9 (−1503); chr19:55393048-55393098/NCR1 (−24435), FCAR (+7524); chr19:55592184-55592212/EPS8L1
(+4977), PPP1R12C (+36729); chr19:55592834-55592898/EPS8L1 (+5645), PPP1R12C (+36061); chr19:55593
254-55593613/EPS8L1 (+6213), PPP1R12C (+35493); chr19:55593850-55593920/EPS8L1 (+6664), PPP1R12
C (+35042); chr19:55597837-55597878/EPS8L1 (+10637), PPP1R12C (+31069); chr19:55598064-55598175/E
PS8L1 (+10899), PPP1R12C (+30807); chr19:55598375-55598488/EPS8L1 (+11211), PPP1R12C (+30495); ch
r19:55598702-55598788/EPS8L1 (+11524), PPP1R12C (+30182); chr19:55652596-55652653/PPP1R12C (−23
698), TNNT1 (+7981); chr19:55672425-55672457/TNNI3 (−3484); chr19:55691819-55691863/SYT5 (−121); chr1
9:55765916-55766061/TMEM86B (−25357), PPP6R1 (+4049); chr19:55766974-55767069/TMEM86B (−26390),
PPP6R1 (+3016); chr19:55770353-55770669/PPP6R1 (−473); chr19:55791407-55791444/BRSK1 (−4108), HSP
BP1 (+325); chr19:55895939-55896038/RPL28 (−1311), TMEM238 (−362); chr19:55897689-55897721/TMEM23
8 (−2078), RPL28 (+405); chr19:55944812-55945054/UBE2S (−25608), SHISA7 (+9297); chr19:55962940-5596
3044/SHISA7 (−8762), ISOC2 (+10057); chr19:55963980-55964040/SHISA7 (−9780), ISOC2 (+9039); chr19:559
64202-55964240/SHISA7 (−9991), ISOC2 (+8828); chr19:56028633-56028662/SBK2 (+19787), SSC5D (+2877
8); chr19:56116897-56116931/ZNF865 (−8045), ZNF524 (+5184); chr19:56186358-56186400/EPN1 (−1612); chr
19:56728603-56728658/ZSCAN5B (−24210), ZSCAN5A (+11028); chr19:56728789-56729207/ZSCAN5B (−2457
7), ZSCAN5A (+10661); chr19:56879394-56879474/ZNF542 (−56); chr19:56904704-56904723/ZNF582 (+175);
chr19:56988284-56988383/ZNF667 (+436); chr19:56988727-56988944/ZNF667 (−66); chr19:56989101-569891
73/ZNF667 (−367); chr19:56989352-56989501/ZNF667 (−657); chr19:56989626-56989696/ZNF667 (−891); chr1
9:57049785-57049807/ZFP28 (−521); chr19:57049987-57050064/ZFP28 (−291); chr19:57050288-57050311/ZF
P28 (−17); chr19:57079299-57079380/ZNF470 (+450); chr19:57106551-57106588/ZNF71 (−94); chr19:5717224
6-57172275/ZNF835 (+10862), ZNF71 (+65597); chr19:57183127-57183373/ZNF835 (−127); chr19:57349203-5
7349240/ZNF835 (−166099), PEG3 (+2872); chr19:57610828-57610895/PEG3 (−258768), USP29 (−20647); chr
19:57617716-57617831/PEG3 (−265680), USP29 (−13735); chr19:57618170-57618408/PEG3 (−266195), USP2
9 (−13220); chr19:57683163-57683239/DUXA (−4345); chr19:57683686-57683805/DUXA (−4890); chr19:577517
00-57751722/ZNF805 (−342); chr19:57831987-57832024/ZNF543 (+141); chr19:57862958-57863221/ZNF304
(+445); chr19:57989048-57989098/ZNF772 (−135); chr19:58071676-58071708/ZNF550 (−3967); chr19:5809489
1-58094924/ZNF416 (−4665), ZIK1 (−720); chr19:58220393-58220515/ZNF154 (+125); chr19:58238746-582389
27/ZNF671 (+158); chr19:58446341-58446423/ZNF418 (+358); chr19:58458891-58458978/ZNF256 (+142); chr
19:58513464-58513525/C19orf18 (−27593), ZNF606 (+1219); chr19:58521316-58521378/ZSCAN1 (−24087), ZN
F606 (−6633); chr19:58545388-58545577/ZSCAN1 (+49); chr19:58570431-58570622/ZNF135 (−80); chr19:5857
0770-58570949/ZNF135 (+253); chr19:58609360-58609472/ZSCAN18 (+20377), ZNF135 (+38809); chr19:586
09601-58609681/ZSCAN18 (+20152), ZNF135 (+39034); chr19:58629407-58629750/ZSCAN18 (+214); chr19:5
8629864-58629974/ZSCAN18 (−126); chr19:58666495-58666550/ZNF329 (−4375); chr19:58838207-58838257/
ZSCAN22 (−153); chr19:58858498-58858560/A1BG (+6336), ZSCAN22 (+20144); chr19:58858805-58858901/A
1BG (+6012), ZSCAN22 (+20468); chr19:58867619-58868196/A1BG (−3043); chr19:58873410-58873523/ZNF4
97 (+747); chr19:58907668-58907722/ZNF584 (−12368), RPS5 (+9059); chr19:58907982-58908310/ZNF584 (−1
1917), RPS5 (+9510); chr19:58919438-58919475/ZNF584 (−606); chr19:58951401-58951525/ZNF132 (+126); c
hr19:58952080-58952140/ZNF132 (−521); chr19:59025258-59025344/SLC27A5 (−1869); chr19:59030911-5903
0947/ZBTB45 (−8); chr2:45932-45969/FAM110C (+637); chr2:467942-468115/FAM150B (−179721), TMEM18
(+209410); chr2:468242-468414/FAM150B (−180020), TMEM18 (+209111); chr2:636827-636940/FAM150B (−348
576), TMEM18 (+40555); chr2:946218-946235/SNTG2 (−327); chr2:946404-946432/SNTG2 (−136); chr2:94665
7-946761/SNTG2 (+155); chr2:947044-947126/SNTG2 (+531); chr2:1253662-1253808/TPO (−163498), SNTG2
(+307181); chr2:1609016-1609081/PXDN (+139242), TPO (+191816); chr2:1747041-1747112/PXDN (+1214),
TPO (+329844); chr2:1748008-1748353/PXDN (+110); chr2:3750859-3751579/ALLC (+45433); chr2:5831205-5
831237/SOX11 (−1578); chr2:5831401-5831467/SOX11 (−1365); chr2:5832048-5832129/SOX11 (−710); chr2:58
32429-5832531/SOX11 (−319); chr2:5833080-5833131/SOX11 (+307); chr2:5833433-5833499/SOX11 (+667);
chr2:5833640-5833734/SOX11 (+888); chr2:5836575-5836621/SOX11 (+3799); chr2:5836745-5836827/SOX11
(+3987); chr2:5837073-5837307/SOX11 (+4391); chr2:5837468-5837518/SOX11 (+4694); chr2:6121566-6121
679/SOX11 (+288824), CMPK2 (+884313); chr2:7148361-7148419/RNF144A (+90867); chr2:7148594-7148645/
RNF144A (+91097); chr2:7571123-7571157/RNF144A (+513617); chr2:8597390-8597431/ID2 (−224702); chr2:
8685238-8685302/ID2 (−136843); chr2:8715636-8715708/ID2 (−106441); chr2:8715980-8716060/ID2 (−106093);
chr2:8723992-8724059/ID2 (−98087); chr2:8816823-8816862/ID2 (−5270); chr2:9235784-9235971/ASAP2 (−11
1016), MBOAT2 (−92002); chr2:9695818-9695862/ADAM17 (+77); chr2:10091589-10091720/GRHL1 (−137); chr
2:10092048-10092071/GRHL1 (+268); chr2:10183124-10183213/KLF11 (−513); chr2:10183462-10183485/KLF
11 (−208); chr2:10183803-10183814/KLF11 (+127); chr2:10220941-10220958/CYS1 (−412); chr2:10231736-102
31886/RRM2 (−30884), CYS1 (−11273); chr2:10444130-10444193/HPCAL1 (+1122), ODC1 (+144291); chr2:10
471419-10471620/HPCAL1 (+28480), ODC1 (+116933); chr2:10550210-10550363/ODC1 (+38166), HPCAL1
(+107247); chr2:10572412-10572451/ODC1 (+16021), HPCAL1 (+129392); chr2:10688931-10689017/ODC1 (−1
00521), NOL10 (+141138); chr2:11052693-11052752/KCNF1 (+660); chr2:11167847-11167913/PQLC3 (−1276
60), KCNF1 (+115817); chr2:11621923-11622000/GREB1 (−52280), E2F6 (−15665); chr2:11622166-11622259/
GREB1 (−52029), E2F6 (−15916); chr2:11622402-11622569/GREB1 (−51756), E2F6 (−16189); chr2:11810116-1
1810146/NTSR2 (+198); chr2:11817712-11817794/LPIN1 (−68987), NTSR2 (−7424); chr2:11837897-11838012/
LPIN1 (−48785), NTSR2 (−27626); chr2:12197763-12197875/TRIB2 (−659179), LPIN1 (+311079); chr2:1608023
5-16080304/MYCN (−413); chr2:17721679-17721750/VSNL1 (−92); chr2:18060141-18060198/KCNS3 (+225); c
hr2:19550331-19550407/NT5C1B-RDH14 (−779523), OSR1 (+8003); chr2:19550546-19550611/NT5C1B-RDH1
4 (−779733), OSR1 (+7793); chr2:19551084-19551162/NT5C1B-RDH14 (−780277), OSR1 (+7249); chr2:195514
49-19551499/NT5C1B-RDH14 (−780628), OSR1 (+6898); chr2:19553219-19553428/NT5C1B-RDH14 (−782478),
OSR1 (+5048); chr2:19556065-19556244/NT5C1B-RDH14 (−785309), OSR1 (+2217); chr2:19556883-195569
80/NT5C1B-RDH14 (−786086), OSR1 (+1440); chr2:19560967-19561042/OSR1 (−2633); chr2:19561473-19561
523/OSR1 (−3126); chr2:20250980-20251147/LAPTM4A (+725); chr2:20251380-20251427/LAPTM4A (+385); c
hr2:20646774-20646843/RHOB (−26); chr2:20851054-20851110/HS1BP3 (−218); chr2:20865159-20865289/GD
F7 (−1200); chr2:20869834-20869861/GDF7 (+3424), APOB (+397097); chr2:24149879-24149938/ATAD2B (+2
7); chr2:24162361-24162431/UBXN2A (−980); chr2:24345999-24346054/PFN4 (+124); chr2:25109600-2510963
6/ADCY3 (+32437), CENPO (+93287); chr2:25390591-25390658/POMC (+934); chr2:25390759-25390811/PO
MC (+774); chr2:25433421-25433512/POMC (−41908), DNMT3A (+131307); chr2:25438878-25438923/POMC
(−47342), DNMT3A (+125873); chr2:25499964-25500051/POMC (−108449), DNMT3A (+64766); chr2:25500162-
25500197/POMC (−108621), DNMT3A (+64594); chr2:25509077-25509162/POMC (−117561), DNMT3A (+5565
4); chr2:25518105-25518160/POMC (−126574), DNMT3A (+46641); chr2:26045137-26045159/DTNB (−148645),
ASXL2 (+56164); chr2:26205465-26205497/KIF3C (−38); chr2:26396963-26397014/HADHA (+70605), RAB10
(+140260); chr2:26407339-26407688/HADHA (+60080), RAB10 (+150785); chr2:26407922-26408092/HADHA
(+59587), RAB10 (+151278); chr2:26521450-26521525/GPR113 (+20429), HADHB (+53872); chr2:26568463-2
6568495/EPT1 (−475); chr2:26568652-26568694/EPT1 (−281); chr2:26624759-26624992/EPT1 (+55922), OTO
F (+156690); chr2:26909150-26909203/CIB4 (−44966), KCNK3 (−6404); chr2:26916067-26916088/KCNK3 (+49
7); chr2:27165501-27165512/MAPRE3 (−28018), DPYSL5 (+94538); chr2:27295119-27295159/OST4 (−572); ch
r2:27309143-27309206/KHK (−436); chr2:27341401-27341457/CGREF1 (+344); chr2:27465187-27465333/SLC
30A3 (+20700), CAD (+25002); chr2:27529745-27529838/UCN (+1338), TRIM54 (+24495); chr2:27530381-275
30429/UCN (+725); chr2:27631952-27631976/PPM1G (+532); chr2:27632625-27632686/PPM1G (−160); chr2:2
7651911-27651930/NRBP1 (+736); chr2:27717708-27717747/GCKR (−1978), FNDC4 (+398); chr2:27718138-2
7718172/GCKR (−1551), FNDC4 (−29); chr2:29033893-29034051/SPDYA (+272); chr2:29338052-29338158/C2
orf71 (−40978), ALK (+806372); chr2:29338748-29338809/C2orf71 (−41652), ALK (+805698); chr2:30143059-30
143137/C2orf71 (−845971), ALK (+1379); chr2:30143323-30143382/C2orf71 (−846226), ALK (+1124); chr2:3014
4151-30144174/ALK (+314); chr2:30370238-30370350/YPEL5 (+544); chr2:30453654-30453784/LBH (−678); c
hr2:30670021-30670049/LCLAT1 (−102); chr2:30998709-30998790/CAPN13 (+31561), LCLAT1 (+328613); chr
2:31360590-31360630/GALNT14 (+982); chr2:31360756-31360803/GALNT14 (+812); chr2:31457261-3145732
5/EHD3 (+413); chr2:31805536-31805625/SRD5A2 (+459); chr2:31805765-31805974/SRD5A2 (+170); chr2:32
390662-32390708/SLC30A6 (−225); chr2:32391175-32391221/SLC30A6 (+288); chr2:32581993-32582020/BIR
C6 (−89); chr2:33172249-33172288/LTBP1 (−100); chr2:37193357-37193416/STRN (+228); chr2:38300861-383
00957/CYP1B1 (+2414), FAM82A1 (+123313); chr2:38301285-38301350/CYP1B1 (+2005), FAM82A1 (+12372
2); chr2:38301675-38301762/CYP1B1 (+1604), FAM82A1 (+124123); chr2:38302188-38302369/CYP1B1 (+104
4), FAM82A1 (+124683); chr2:38302901-38302948/CYP1B1 (+398); chr2:38830113-38830190/HNRPLL (+26);
chr2:39187044-39187092/ARHGEF33 (+40564), SOS1 (+160536); chr2:39187238-39187417/ARHGEF33 (+40
824), SOS1 (+160276); chr2:39351644-39351702/SOS1 (−4069); chr2:39892748-39892804/TMEM178 (−259); c
hr2:40679605-40679688/SLC8A1 (−22203); chr2:42325910-42326069/EML4 (−70500), PKDCC (+50829); chr2:4
2329445-42329493/EML4 (−67021), PKDCC (+54308); chr2:42587646-42587714/COX7A2L (+1308), EML4 (+1
91190); chr2:42719906-42720157/COX7A2L (−131044), KCNG3 (+1205); chr2:42720463-42720772/KCNG3
(+619); chr2:43020325-43020503/HAAO (−663); chr2:43054825-43054879/HAAO (−35101), ZFP36L2 (+398893);
chr2:43132933-43132951/HAAO (−113191), ZFP36L2 (+320803); chr2:43397997-43398117/HAAO (−378306), Z
FP36L2 (+55688); chr2:43451846-43451891/HAAO (−432118), ZFP36L2 (+1876); chr2:44001154-44001213/DY
NC2LI1 (+6); chr2:44394953-44395000/PPM1B (−1023); chr2:44588791-44588834/CAMKMT (−230), PREPL
(+188); chr2:44995688-44995716/SIX3 (−173335), CAMKMT (+406659); chr2:45028561-45028603/SIX3 (−140455),
CAMKMT (+439539); chr2:45029059-45029183/SIX3 (−139916), CAMKMT (+440078); chr2:45029779-45029
987/SIX3 (−139154), CAMKMT (+440840); chr2:45155211-45155355/SIX3 (−13754), CAMKMT (+566240); chr2:
45156812-45156832/SIX3 (−12215), CAMKMT (+567779); chr2:45161541-45161597/SIX3 (−7468), CAMKMT
(+572526); chr2:45164608-45164656/SIX3 (−4405); chr2:45168079-45168164/SIX3 (−915); chr2:45170123-45170
168/SIX3 (+1109), SIX2 (+66396); chr2:45170582-45170718/SIX3 (+1613), SIX2 (+65892); chr2:45171031-451
71096/SIX3 (+2027), SIX2 (+65478); chr2:45171564-45171836/SIX3 (+2663), SIX2 (+64842); chr2:45227553-4
5227987/SIX2 (+8772), SIX3 (+58733); chr2:45228577-45228626/SIX2 (+7940), SIX3 (+59565); chr2:45231151-
45231244/SIX2 (+5344), SIX3 (+62161); chr2:45231538-45231696/SIX2 (+4925), SIX3 (+62580); chr2:452404
27-45240490/SIX2 (−3917); chr2:45240631-45240763/SIX2 (−4155); chr2:45241169-45241232/SIX2 (−4659); chr
2:45397303-45397345/81X2 (−160782), SRBD1 (+441109); chr2:45397483-45397506/SIX2 (−160953), SRBD1
(+440938); chr2:46770252-46770288/RHOQ (+403); chr2:47206751-47206854/TTC7A (+38490), CALM2 (+196
937); chr2:47210423-47210514/TTC7A (+42156), CALM2 (+193271); chr2:47403663-47403706/CALM2 (+55);
chr2:47799033-47799123/KCNK12 (−1608); chr2:48010116-48010160/MSH6 (−83); chr2:48541436-48541485/F
OXN2 (−334); chr2:48982701-48982753/LHCGR (+153); chr2:50573377-50573484/NRXN1 (+686243); chr2:505
73639-50573691/NRXN1 (+686009); chr2:50574356-50574401/NRXN1 (+685295); chr2:50574685-50574738/N
RXN1 (+684962); chr2:51259141-51259201/NRXN1 (+503); chr2:54784837-54784958/EML6 (−167251), RPL23
AP32 (+28539); chr2:55276260-55276305/RTN4 (+1451), EML6 (+324134); chr2:55459270-55459317/C2orf63
(+155), RPS27A (+255); chr2:55921006-55921038/PNPT1 (−11); chr2:56150536-56150681/EFEMP1 (+689); ch
r2:58468230-58468297/FANCL (+251); chr2:60666900-60666928/BCL11A (+113719); chr2:60782677-6078277
7/BCL11A (−2094); chr2:60797739-60797850/PAPOLG (−185570), BCL11A (−17162); chr2:61292606-61292645/
C2orf74 (−97003), PUS10 (−47261); chr2:61404860-61404897/AHSA2 (+324); chr2:61698185-61698214/USP34
(−351); chr2:61763690-61763892/USP34 (−65942), XPO1 (+1627); chr2:61764558-61764569/XPO1 (+854); chr
2:62422471-62422497/B3GNT2 (−778); chr2:62684078-62684131/TMEM17 (+49499), B3GNT2 (+260843); chr2:
62798447-62798511/EHBP1 (−134522), TMEM17 (−64875); chr2:63274711-63275010/OTX1 (−3076); chr2:632
75192-63275326/OTX1 (−2678); chr2:63279022-63279141/OTX1 (+1145), WDPCP (+536785); chr2:63279949-
63280154/OTX1 (+2115), WDPCP (+535815); chr2:63282867-63282955/OTX1 (+4974), WDPCP (+532956); ch
r2:63286048-63286354/OTX1 (+8264), WDPCP (+529666); chr2:63286585-63286693/OTX1 (+8702), WDPCP
(+529228); chr2:63286817-63286885/OTX1 (+8914), WDPCP (+529016); chr2:64682204-64682235/LGALSL
(+893); chr2:64836433-64836470/SERTAD2 (+44594), AFTPH (+85013); chr2:64836633-64836746/SERTAD2
(+44356), AFTPH (+85251); chr2:64863609-64863650/SERTAD2 (+17416), AFTPH (+112191); chr2:65092901-6
5092951/SERTAD2 (−211880), SLC1A4 (−123569); chr2:65216166-65216199/SLC1A4 (−312); chr2:65216578-6
5216614/SLC1A4 (+101); chr2:65356961-65357006/RAB1A (+451); chr2:65357249-65357304/RAB1A (+158); c
hr2:65660591-65660676/SPRED2 (−978); chr2:66653934-66654136/SPRED2 (−994379), MEIS1 (−8497); chr2:6
6659462-66659535/MEIS1 (−3033); chr2:66666408-66666698/ETAA1 (−957889), MEIS1 (+4021); chr2:6667165
8-66671794/ETAA1 (−952716), MEIS1 (+9194); chr2:66672431-66672462/ETAA1 (−951995), MEIS1 (+9915); ch
r2:66673076-66673138/ETAA1 (−951335), MEIS1 (+10575); chr2:66673272-66673321/ETAA1 (−951145), MEIS
1 (+10765); chr2:66673591-66673634/ETAA1 (−950829), MEIS1 (+11081); chr2:66808634-66808726/ETAA1
(−815762), MEIS1 (+146148); chr2:68479126-68479170/PPP3R1 (+503); chr2:68546231-68546249/PPP3R1 (−66
589), PLEK (−46082); chr2:68546517-68546552/PPP3R1 (−66884), PLEK (−45787); chr2:68589404-68589508/P
LEK (−2866); chr2:68694060-68694138/APLF (−592); chr2:69001773-69001853/ARHGAP25 (+39900), BMP10
(+96836); chr2:69064445-69064579/BMP10 (+34137), ARHGAP25 (+102599); chr2:69534748-69534773/GFPT
1 (+79625), ANTXR1 (+294485); chr2:70370085-70370094/PCBP1 (+55505), TIA1 (+105689); chr2:71017540-
71017738/FIGLA (+136); chr2:71017851-71017960/FIGLA (−131); chr2:71113829-71113880/CD207 (−50902), V
AX2 (−13865); chr2:71114917-71114939/CD207 (−51975), VAX2 (−12792); chr2:71115097-71115165/CD207 (−5
2178), VAX2 (−12589); chr2:71115961-71116118/CD207 (−53087), VAX2 (−11680); chr2:71116232-71116335/C
D207 (−53331), VAX2 (−11436); chr2:71123991-71124072/VAX2 (−3688); chr2:71124469-71124530/VAX2 (−322
0); chr2:71127994-71128059/VAX2 (+307); chr2:71128670-71128707/VAX2 (+969); chr2:71128935-71128996/
ATP6V1B1 (−34032), VAX2 (+1246); chr2:71131848-71132150/ATP6V1B1 (−30999), VAX2 (+4279); chr2:71134
585-71134745/ATP6V1B1 (−28333), VAX2 (+6945); chr2:72371254-72371406/CYP26B1 (+3633), DYSF (+6774
98); chr2:72374526-72374563/CYP26B1 (+418); chr2:72374690-72374713/CYP26B1 (+261); chr2:72376723-7
2376765/CYP26B1 (−1781); chr2:73147528-73147966/EMX1 (+3143), SFXN5 (+151218); chr2:73148067-7314
8174/EMX1 (+3517), SFXN5 (+150844); chr2:73151884-73151946/EMX1 (+7311), SFXN5 (+147050); chr2:731
52231-73152264/EMX1 (+7644), SFXN5 (+146717); chr2:73152679-731 52739/EMX1 (+8105), SFXN5 (+14625
6); chr2:73297630-73297735/SFXN5 (+1282), EMX1 (+153079); chr2:73340372-73340425/RAB11FIP5 (−253);
chr2:73429923-73429976/NOTO (+564); chr2:73430191-73430201/NOTO (+810); chr2:73430373-73430442/S
MYD5 (−10958), NOTO (+1022); chr2:74374694-74374740/BOLA3 (+322); chr2:74405682-74405752/MOB1A
(+278); chr2:74642053-74642227/DCTN1 (−34658), C2orf81 (+2704); chr2:74642637-74642695/DCTN1 (−35184),
C2orf81 (+2178); chr2:74642811-74642871/DCTN1 (−35359), C2orf81 (+2003); chr2:74684399-74684460/WB
P1 (−1097); chr2:74710039-74710101/TTC31 (−130), CCDC142 (+287); chr2:74724941-74725058/CCDC142 (−1
4643), LBX2 (+5443); chr2:74725173-74725425/CCDC142 (−14942), LBX2 (+5144); chr2:74726448-74726598/
CCDC142 (−16166), LBX2 (+3920); chr2:74726860-74727020/CCDC142 (−16583), LBX2 (+3503); chr2:7472939
9-74729456/CCDC142 (−19071), LBX2 (+1015); chr2:74734830-74734879/LBX2 (−4412), PCGF1 (−34); chr2:74
741845-74741872/TLX2 (+263); chr2:74742166-74742256/TLX2 (+615); chr2:74742648-74742693/TLX2 (+107
5), DQX1 (+10737); chr2:74743206-74743766/TLX2 (+1890), DQX1 (+9922); chr2:74782088-74782218/LOXL3
(−1091), DOK1 (+641); chr2:74782471-74782565/LOXL3 (−1456), DOK1 (+1006); chr2:74875214-74875376/C2
orf65 (−131); chr2:75062529-75062575/POLE4 (−123223), HK2 (+2770); chr2:75788286-75788330/FAM176A
(−216); chr2:79220337-79220374/REG3G (−32470); chr2:79740016-79740063/CTNNA2 (−20); chr2:80529909-80
529985/LRRTM1 (+1540), CTNNA2 (+789887); chr2:80530328-80530408/LRRTM1 (+1119), CTNNA2 (+79030
8); chr2:80530587-80530622/LRRTM1 (+882); chr2:85361310-85361466/TCF7L1 (+805); chr2:85361841-8536
1889/TCF7L1 (+1282), TGOLN2 (+193554); chr2:85554338-85554392/TGOLN2 (+1054), TCF7L1 (+193782); c
hr2:85633145-85633252/CAPG (+4477), ELMOD3 (+51356); chr2:85645628-85645835/MAT2A (−120369), CAP
G (−8056); chr2:85811412-85811518/VAMP5 (−66); chr2:85822758-85822811/RNF181 (−52); chr2:85839139-85
839181/USP39 (−4123); chr2:85999360-85999497/ATOH8 (+18520), ST3GAL5 (+116728); chr2:86332847-863
32909/PTCD3 (−427), POLR1A (+400); chr2:86333255-86333309/PTCD3 (−23), POLR1A (−4); chr2:86422068-8
6422111/MRPL35 (−4466), IMMT (+803); chr2:87016050-87016119/RNF103 (−165085), CD8A (+2752); chr2:87
016509-87016575/RNF103 (−165542), CD8A (+2295); chr2:87017018-87017192/RNF103 (−166105), CD8A (+1
732); chr2:87036648-87036815/CD8A (−17895), CD8B (+52315); chr2:87089567-87089633/CD8B (−553); chr2:
87175577-87175643/PLGLB1 (−871996), RGPD1 (+30872); chr2:87883811-87883908/PLGLB1 (−163746), RGP
D1 (+739122); chr2:88302765-88302792/RGPD2 (−177493), SMYD1 (−64520); chr2:88470012-88470079/THNS
L2 (−2612); chr2:88751420-88751460/FOXI3 (+613); chr2:88849493-88849562/C2orf51 (+25359), EIF2AK3 (+7
7566); chr2:88926445-88926490/EIF2AK3 (+626); chr2:88926986-88927015/EIF2AK3 (+93); chr2:89064514-89
064805/RPIA (+73484); chr2:89064976-89065128/RPIA (+73876); chr2:90448043-90448081/NONE; chr2:9163
4762-91634784/ACTR3BP2 (−494386); chr2:91635003-91635152/ACTR3BP2 (−494081); chr2:91777609-91777
635/ACTR3BP2 (−351537); chr2:91873960-91874034/ACTR3BP2 (−255162); chr2:91874200-91874586/ACTR3
BP2 (−254766); chr2:91936943-91936958/ACTR3BP2 (−192208); chr2:91997573-91997593/ACTR3BP2 (−1315
76); chr2:92028067-92028226/ACTR3BP2 (−101012); chr2:92028348-92028366/ACTR3BP2 (−100802); chr2:92
230369-92230377/ACTR3BP2 (+101214); chr2:92230556-92230579/ACTR3BP2 (+101409); chr2:92231101-92
231145/ACTR3BP2 (+101964); chr2:92231334-92231384/ACTR3BP2 (+102200); chr2:95401392-95401473/TE
KT4 (−135799); chr2:95523003-95523095/TEKT4 (−14183); chr2:95523913-95524005/TEKT4 (−13273); chr2:96
011525-96011564/FAHD2A (−56903), KCNIP3 (+48473); chr2:96781984-96782022/ADRA2B (−115); chr2:96971
833-96971887/SNRNP200 (−553); chr2:97193064-97193251/NEURL3 (−22064), ARID5A (−9306); chr2:9753520
7-97535225/SEMA4C (+519); chr2:98280400-98280436/ACTR1B (+143); chr2:98698234-98698353/CNGA3 (−2
64324), TMEM131 (−85940); chr2:98962901-98962973/CNGA3 (+319); chr2:98963826-98963868/INPP4A (−97
474), CNGA3 (+1229); chr2:99346532-99346574/MGAT4A (+1036), UNC50 (+121511); chr2:99438934-994390
78/MGAT4A (−91417), TSGA10 (+332181); chr2:99439259-99439364/MGAT4A (−91723), TSGA10 (+331875); c
hr2:99553668-99553798/MGAT4A (−206144), TSGA10 (+217454); chr2:99771109-99771144/LIPT1 (−291), TS
GA10 (+60); chr2:100106642-100106710/REV1 (−196); chr2:100758956-100759013/AFF3 (−36940), LONRF2
(+180210); chr2:100938210-100938329/LONRF2 (+925); chr2:100938545-100938574/LONRF2 (+635); chr2:10
0938810-100938984/LONRF2 (+298); chr2:101033633-101033731/CHST10 (+448); chr2:101435552-10143559
0/NPAS2 (−1042); chr2:101869802-101869860/C2orf29 (+486); chr2:101958964-101958992/RNF149 (−33800),
CREG2 (+44987); chr2:102314082-102314091/MAP4K4 (−78); chr2:102804347-102804404/IL1RL2 (+943); chr
2:105275173-105275229/POU3F3 (−196768); chr2:105459152-105459902/POU3F3 (−12442); chr2:105461065-
105461163/POU3F3 (−10855); chr2:105461414-105461555/POU3F3 (−10484); chr2:105461668-105461699/PO
U3F3 (−10285); chr2:105469857-105469880/POU3F3 (−2100); chr2:105472426-105472617/POU3F3 (+553); ch
r2:105474370-105474435/MRPS9 (−180080), POU3F3 (+2434); chr2:105480025-105480109/MRPS9 (−174416),
POU3F3 (+8098); chr2:105480389-105480629/MRPS9 (−173974), POU3F3 (+8540); chr2:105484000-105484
038/MRPS9 (−170464), POU3F3 (+12050); chr2:105489981-105490035/MRPS9 (−164475), POU3F3 (+18039);
chr2:105954159-105954225/C2orf49 (+179); chr2:105979729-105979833/C2orf49 (+25768), FHL2 (+35900); c
hr2:106361770-106361856/FHL2 (−346132), NCK2 (−106391); chr2:106403029-106403039/FHL2 (−387353), NC
K2 (−65170); chr2:106810850-106810860/UXS1 (−60); chr2:107103196-107103301/RGPD3 (−18448), ST6GAL2
(+400314); chr2:107104272-107104337/RGPD3 (−19504), ST6GAL2 (+399258); chr2:107502035-107502087/R
GPD3 (−417260), ST6GAL2 (+1502); chr2:107502486-107502518/RGPD3 (−417701), ST6GAL2 (+1061); chr2:1
07502730-107502865/ST6GAL2 (+765); chr2:107503264-107503346/ST6GAL2 (+258); chr2:108602905-10860
3014/SLC5A7 (−35); chr2:109065020-109065087/GCC2 (−523); chr2:109065493-109065524/GCC2 (−68); chr2:1
09196275-109196406/LIMS1 (−74927), GCC2 (+130764); chr2:109336324-109336344/RANBP2 (+397); chr2:10
9746388-109746462/SH3RF3 (+428); chr2:110552306-110552341/LIMS3 (−103685), RGPD6 (+1989); chr2:110
969955-110970010/NPHP1 (−7344), LIMS3 (+260669); chr2:111141070-11114112/NPHP1 (−178452), LIMS3
(+89561); chr2:111141818-111141879/NPHP1 (−179210), LIMS3 (+88803); chr2:111180813-111180979/NPHP1
(−218257), LIMS3 (+49756); chr2:111181401-111181474/NPHP1 (−218799), LIMS3 (+49214); chr2:111490007-
111490023/ACOXL (−135); chr2:111563719-111563767/BCL2L11 (−314748), ACOXL (+73593); chr2:11187642
6-111876774/BCL2L11 (−1891); chr2:111876879-111877075/BCL2L11 (−1514); chr2:112124030-112124077/BC
L2L11 (+245563), ANAPC1 (+517687); chr2:112238443-112238457/BCL2L11 (+359959), ANAPC1 (+403291);
chr2:112641350-112641379/ANAPC1 (+376); chr2:112657313-112657383/TMEM87B (−155452), MERTK (+115
7); chr2:112939287-112939458/FBLN7 (+43411), ZC3H8 (+73291); chr2:113012376-113012388/ZC3H8 (+282);
chr2:113033597-113033659/ZC3H6 (+450); chr2:114033552-114033604/PAX8 (+2920), PSD4 (+102018); chr
2:114034477-114034670/PAX8 (+1924), PSD4 (+103014); chr2:114034907-114035176/PAX8 (+1456), PSD4
(+103482); chr2:114035476-114035704/PAX8 (+908); chr2:114256780-114256870/FOXD4L1 (+164); chr2:1143
61333-114361346/RABL2A (−23477), WASH2P (+7695); chr2:114513832-114513896/SLC35F5 (+536); chr2:11
5918893-115918947/DPP10 (−593); chr2:115919151-115919337/DPP10 (−269); chr2:115919594-115919784/D
PP10 (+176); chr2:118981857-118981945/INSIG2 (+135851), EN1 (+623858); chr2:118982148-118982253/INS
IG2 (+136151), EN1 (+623558); chr2:119067515-119067551/INSIG2 (+221483), EN1 (+538226); chr2:1195915
68-119591658/EN1 (+14146), INSIG2 (+745563); chr2:119592140-119592240/EN1 (+13569), INSIG2 (+746140);
chr2:119599458-119599829/EN1 (+6115), INSIG2 (+753594); chr2:119600953-119600995/EN1 (+4785), INS
IG2 (+754924); chr2:119602630-119602828/EN1 (+3030), INSIG2 (+756679); chr2:119604680-119604689/EN1
(+1074), INSIG2 (+758635); chr2:119605470-119605501/EN1 (+273); chr2:119606500-119606630/EN1 (−806);
chr2:119607624-119607847/EN1 (−1977); chr2:119610375-119610540/EN1 (−4699); chr2:119610940-1196109
98/MARCO (−88776), EN1 (−5210); chr2:119611253-119611311/MARCO (−88463), EN1 (−5523); chr2:11961448
1-119614602/MARCO (−85203), EN1 (−8783); chr2:119616552-119616781/MARCO (−83078), EN1 (−10908); chr
2:119913245-119913310/C1QL2 (+3193), MARCO (+213533); chr2:119914200-119914247/C1QL2 (+2247), M
ARCO (+214479); chr2:119914469-119914529/C1QL2 (+1972), MARCO (+214754); chr2:119915607-1199165
24/C1QL2 (+405); chr2:120281901-120281938/SCTR (+108); chr2:120770938-120770966/EPB41L5 (+348); ch
r2:121104077-121104109/INHBB (+374); chr2:121105371-121105515/GLI2 (−449424), INHBB (+1724); chr2:12
1106691-121106786/GLI2 (−448128), INHBB (+3020); chr2:121269284-121269312/GLI2 (−285569), INHBB (+1
65579); chr2:121499455-121499643/GLI2 (−55318), INHBB (+395830); chr2:121624850-121624990/GLI2 (+700
53), TFCP2L1 (+417858); chr2:121625126-121625154/GLI2 (+70273), TFCP2L1 (+417638); chr2:121625686-1
21625734/GLI2 (+70843), TFCP2L1 (+417068); chr2:122407072-122407098/CLASP1 (−33); chr2:124782193-1
24782288/CNTNAP5 (−623); chr2:127413728-127413969/GYPC (+165); chr2:127977384-127977421/CYP27C1
(−14060), ERCC3 (+74349); chr2:128180415-128180471/PROC (+4447), IWS1 (+103644); chr2:128410712-12
8410746/GPR17 (+7290), LIMS2 (+11438); chr2:128421850-128421890/LIMS2 (+297); chr2:128432694-12843
2741/SFT2D3 (−25879), LIMS2 (−10551); chr2:129076115-129076132/HS6ST1 (+47); chr2:129492224-1294923
59/HS6ST1 (−416121); chr2:129492784-129492908/HS6ST1 (−416675); chr2:129494765-129494787/HS6ST1
(−418605); chr2:130737205-130737256/RAB6C (−4); chr2:130750152-130750422/RAB6C (+13052), POTEF (+13
6508); chr2:130750760-130750810/RAB6C (+13550), POTEF (+136010); chr2:130763677-130763729/RAB6C
(+26468), POTEF (+123092); chr2:130971042-130971062/TUBA3E (−15018), CCDC115 (+128870); chr2:13098
6930-130986966/TUBA3E (−30914), CCDC115 (+112974); chr2:131113875-131113904/PTPN18 (+310); chr2:1
31280357-131280423/CFC1 (+1723), TISP43 (+23650); chr2:131280557-131280589/CFC1 (+1906), TISP43
(+23467); chr2:131285128-131285194/CFC1 (+6494), TISP43 (+18879); chr2:131285393-131285429/CFC1 (+67
44), TISP43 (+18629); chr2:131350478-131350596/CFC1B (+6714), TISP43 (+18687); chr2:131355316-13135
5558/CFC1B (+1814), TISP43 (+23587); chr2:131450454-131450514/CFC1B (−93233), GPR148 (−36159); chr2:
131451107-131451139/CFC1B (−93872), GPR148 (−35520); chr2:131594922-131594947/ARHGEF4 (−77851),
GPR148 (+108292); chr2:131595283-131595300/ARHGEF4 (−77494), GPR148 (+108649); chr2:131673982-13
1674100/PLEKHB2 (−188379), ARHGEF4 (+1255); chr2:131720732-131720786/PLEKHB2 (−141661), ARHGEF
4 (+47973); chr2:131721189-131721437/PLEKHB2 (−141107), ARHGEF4 (+48527); chr2:131721585-13172167
0/PLEKHB2 (−140792), ARHGEF4 (+48842); chr2:131792520-131792531/PLEKHB2 (−69894), ARHGEF4 (+119
740); chr2:131792747-131792920/PLEKHB2 (−69586), ARHGEF4 (+120048); chr2:131793154-131793187/PLE
KHB2 (−69249), ARHGEF4 (+120385); chr2:131797328-131797382/PLEKHB2 (−65065), ARHGEF4 (+124569);
chr2:131797568-131797750/PLEKHB2 (−64761), ARHGEF4 (+124873); chr2:131862958-131863088/PLEKHB2
(+603); chr2:132088639-132088785/WTH3DI (+33019), POTEE (+112788); chr2:132110965-132111113/WTH3
DI (+10692), POTEE (+135115); chr2:132121223-132121284/WTH3DI (+477); chr2:132121618-132121651/WT
H3DI (+96); chr2:132182470-132182562/WTH3DI (−60785), TUBA3D (−51064); chr2:132430625-132430690/GP
R39 (−743489), LOC150776 (+180272); chr2:132559349-132559390/GPR39 (−614777), LOC150776 (+308984);
chr2:132559508-132559531/GPR39 (−614627), LOC150776 (+309134); chr2:132587093-132587168/GPR39
(−587016), LOC150776 (+336745); chr2:132795223-132795260/GPR39 (−378905), LOC150776 (+544856); chr2:
132795404-132795446/GPR39 (−378722), LOC150776 (+545039); chr2:133011389-133011423/GPR39 (−1627
41), LOC150776 (+761020); chr2:133014662-133014723/GPR39 (−159454), LOC150776 (+764307); chr2:1330
33368-133033442/GPR39 (−140742), LOC150776 (+783019); chr2:133062299-133062361/GPR39 (−111817), L
OC150776 (+811944); chr2:133426014-133426128/LYPD1 (+2410), GPR39 (+251924); chr2:133428774-13342
8819/LYPD1 (−316); chr2:136499679-136499730/UBXN4 (+516); chr2:136743162-136743181/DARS (+50); chr
2:137522750-137522848/CXCR4 (−647074), THSD7B (−225663); chr2:137523393-137523516/CXCR4 (−647730),
THSD7B (−225007); chr2:139537823-139537850/NXPH2 (−26); chr2:144694515-144694553/GTDC1 (+39554
9), ARHGAP15 (+807635); chr2:145090318-145090363/GTDC1 (−258); chr2:145274511-145274576/GTDC1 (−1
84461), ZEB2 (+3414); chr2:149632858-149632888/KIF5C (+81); chr2:149684868-149684973/LYPD6B (−2100
60), KIF5C (+52129); chr2:153573899-153573933/ARL6IP6 (−491), PRPF40A (+59); chr2:153574916-15357499
6/PRPF40A (−981), ARL6IP6 (+549); chr2:154334805-154335018/RPRM (+410); chr2:154727992-154728244/G
ALNT13 (−308); chr2:154728441-154728503/GALNT13 (+46); chr2:154728905-154729030/GALNT13 (+542); c
hr2:154729316-154729379/GALNT13 (+922); chr2:155554016-155554076/KCNJ3 (−1047); chr2:155555754-15
5555817/KCNJ3 (+693); chr2:155555926-155556041/KCNJ3 (+891); chr2:157184831-157184894/NR4A2 (+44
24); chr2:157185657-157185700/NR4A2 (+3608); chr2:157185999-157186024/NR4A2 (+3275); chr2:15718614
0-157186194/NR4A2 (+3120); chr2:158484919-158484949/ACVR1C (+465); chr2:160472404-160472575/BAZ2
B (+622); chr2:160760899-160760959/LY75-CD302 (+338); chr2:160778391-160778468/LY75-CD302 (−17163),
PLA2R1 (+140696); chr2:161263830-161263896/ITGB6 (−207274), RBMS1 (+86455); chr2:161264355-16126
4419/ITGB6 (−207798), RBMS1 (+85931); chr2:162273315-162273382/TBR1 (+729); chr2:162275227-1622753
10/SLC4A10 (−205576), TBR1 (+2649); chr2:162275438-162275472/SLC4A10 (−205390), TBR1 (+2835); chr2:1
62280482-162280740/SLC4A10 (−200234), TBR1 (+7991); chr2:162283704-1 62283765/SLC4A10 (−197110), T
BR1 (+11115); chr2:162284508-162284643/SLC4A10 (−196269), TBR1 (+11956); chr2:162930285-162930338/
DPP4 (+740); chr2:163200619-163200670/GCA (+62); chr2:163200775-163200820/GCA (+215); chr2:1636951
89-163695246/KCNH7 (+39); chr2:163695653-163695679/KCNH7 (−409); chr2:164591792-164591863/FIGN
(+685); chr2:166650410-166650454/GALNT3 (+371); chr2:167232988-167233063/SCN9A (−529); chr2:16746715
3-167467174/XIRP2 (−277833), SCN7A (−123683); chr2:169103673-169103693/STK39 (+422); chr2:169104282-
169104341/STK39 (−207); chr2:170625210-170625345/SSB (−30044), PHOSPHO2 (+74314); chr2:171564690-
171564756/SP5 (−7134), MYO3B (+530068); chr2:171570062-171570181/SP5 (−1735); chr2:171572949-17157
3231/GAD1 (−100110), SP5 (+1233); chr2:171627313-171627346/GAD1 (−45870), SP5 (+55473); chr2:1716704
47-171670471/GAD1 (−2741); chr2:171671790-171671799/GAD1 (−1405); chr2:171675383-171675522/GORAS
P2 (−109495), GAD1 (+2253); chr2:171676416-171676521/GORASP2 (−108479), GAD1 (+3269); chr2:1716767
87-171676857/GORASP2 (−108126), GAD1 (+3622); chr2:171678223-171678293/GORASP2 (−106690), GAD1
(+5058); chr2:171678684-171678980/GORASP2 (−106116), GAD1 (+5632); chr2:171679674-171679779/GORA
SP2 (−105221), GAD1 (+6527); chr2:171680032-171680071/GORASP2 (−104896), GAD1 (+6852); chr2:172865
042-172865172/METAP1D (+303); chr2:172947974-172948171/DLX1 (−2135); chr2:172949283-172949348/DL
X1 (−892); chr2:172951543-172951779/DLX1 (+1453), DLX2 (+15817); chr2:172952882-172952992/DLX1 (+27
29), DLX2 (+14541); chr2:172953096-172953124/DLX1 (+2902), DLX2 (+14368); chr2:172954917-172954947/
DLX1 (+4724), DLX2 (+12546); chr2:172955403-172955471/DLX1 (+5229), DLX2 (+12041); chr2:172961834-1
72961876/DLX2 (+5623), DLX1 (+11647); chr2:172964997-172965018/DLX2 (+2470), DLX1 (+14800); chr2:17
2965299-172965581/DLX2 (+2038), DLX1 (+15232); chr2:172965763-172965958/DLX2 (+1617), DLX1 (+1565
3); chr2:172972891-172972930/ITGA6 (−319403), DLX2 (−5433); chr2:173941263-173941327/ZAK (+730); chr2:
174219266-174219326/CDCA7 (−265); chr2:174877712-174877854/SP3 (−47353), OLA1 (+235582); chr2:1751
91973-175192084/OLA1 (−78664), SP9 (−7792); chr2:175193645-175193808/OLA1 (−80362), SP9 (−6094); chr2:
175195859-175195948/SP9 (−3917); chr2:175198592-175198658/SP9 (−1196); chr2:175198767-175198845/SP
9 (−1015); chr2:175199600-175199658/SP9 (−192); chr2:175200441-175200495/SP9 (+647); chr2:175200853-1
75200916/SP9 (+1064), CIR1 (+59558); chr2:175201183-175201309/SP9 (+1425), CIR1 (+59197); chr2:17520
1829-175202126/SP9 (+2157), CIR1 (+58465); chr2:175202276-175202351/SP9 (+2493), CIR1 (+58129); chr2:
175202601-175202633/SP9 (+2796), CIR1 (+57826); chr2:175205048-175205111/SP9 (+5259), CIR1 (+55363);
chr2:175205498-175205587/SP9 (+5722), CIR1 (+54900); chr2:175206906-175206960/SP9 (+7112), CIR1
(+53510); chr2:175208869-175208996/SP9 (+9112), CIR1 (+51510); chr2:175595007-175595072/WIPF1 (−95733),
CHRNA1 (+34160); chr2:176032904-176032922/ATF2 (−16); chr2:176931460-176931580/KIAA1715 (−64502),
HOXD10 (−49972), HOXD11 (−40564), HOXD12 (−33010), HOXD13 (−26012), EVX2 (+17170); chr2:176931688-
176932059/KIAA1715 (−64856), HOXD10 (−49618), HOXD11 (−40210), HOXD12 (−32656), HOXD13 (−25658),
EVX2 (+16816); chr2:176932437-176932483/KIAA1715 (−65442), HOXD10 (−49032), HOXD11 (−39624), HOXD
12 (−32070), HOXD13 (−25072), EVX2 (+16230); chr2:176936300-176936435/KIAA1715 (−69350), HOXD10 (−4
5124), HOXD11 (−35716), HOXD12 (−28162), HOXD13 (−21164), EVX2 (+12322); chr2:176944405-176944456/
KIAA1715 (−77413), HOXD10 (−37061), HOXD11 (−27653), HOXD12 (−20099), HOXD13 (−13101), EVX2 (+4259);
chr2:176944870-176945013/KIAA1715 (−77924), HOXD10 (−36550), HOXD11 (−27142), HOXD12 (−19588), H
OXD13 (−12590), EVX2 (+3748); chr2:176946868-176947189/KIAA1715 (−80011), HOXD10 (−34463), HOXD11
(−25055), HOXD12 (−17501), HOXD13 (−10503), EVX2 (+1661); chr2:176947654-176947763/HOXD10 (−33783),
HOXD11 (−24375), HOXD12 (−16821), HOXD13 (−9823), EVX2 (+981); chr2:176948015-176948351/HOXD10
(−33309), HOXD11 (−23901), HOXD12 (−16347), HOXD13 (−9349), EVX2 (+507); chr2:176950002-176950074/HO
XD10 (−31454), HOXD11 (−22046), HOXD12 (−14492), HOXD13 (−7494), EVX2 (−1348); chr2:176950761-17695
0824/HOXD10 (−30699), HOXD11 (−21291), HOXD12 (−13737), HOXD13 (−6739), EVX2 (−2103); chr2:17695219
1-176952318/HOXD10 (−29237), HOXD11 (−19829), HOXD12 (−12275), HOXD13 (−5277), EVX2 (−3565); chr2:1
76956600-176956644/HOXD10 (−24870), HOXD11 (−15462), HOXD12 (−7908), HOXD13 (−910); chr2:17695741
5-176957576/HOXD10 (−23996), HOXD11 (−14588), HOXD12 (−7034), HOXD13 (−36); chr2:176957685-176957
820/HOXD10 (−23739), HOXD11 (−14331), HOXD12 (−6777), HOXD13 (+221); chr2:176963254-176963321/HO
XD10 (−18204), HOXD11 (−8796), HOXD12 (−1242); chr2:176964150-176964179/HOXD10 (−17327), HOXD11
(−7919), HOXD12 (−365); chr2:176964334-176964389/HOXD10 (−17130), HOXD11 (−7722), HOXD12 (−168); chr2:
176964768-176965264/HOXD10 (−16476), HOXD11 (−7068), HOXD12 (+486); chr2:176969614-176969676/HO
XD10 (−11847), HOXD11 (−2439); chr2:176971652-176972103/HOXD10 (−9614), HOXD11 (−206); chr2:1769726
72-176972684/HOXD10 (−8814), HOXD11 (+594); chr2:176973262-176973276/HOXD10 (−8223), HOXD11 (+1
185); chr2:176973565-176973598/HOXD10 (−7910), HOXD11 (+1498); chr2:176976816-176976942/HOXD10
(−4613); chr2:176979706-176979772/HOXD10 (−1753); chr2:176980938-176981355/HOXD10 (−345); chr2:17698
2420-176982517/HOXD9 (−4944), HOXD10 (+977); chr2:176986498-176986711/HOXD9 (−808); chr2:17698740
3-176987735/HOXD9 (+156); chr2:176988104-176988154/HOXD9 (+716); chr2:176992950-176993058/HOXD8
(−1464); chr2:176994380-176994497/HOXD8 (−29); chr2:176994687-176994763/HOXD8 (+257); chr2:1769948
89-176995061/HOXD8 (+507); chr2:177001696-177001781/HOXD4 (−14374), HOXD8 (+7271); chr2:17700358
9-177003734/HOXD4 (−12451), HOXD8 (+9194); chr2:177004498-177004555/HOXD4 (−11586), HOXD8 (+100
59); chr2:177014471-177014540/HOXD4 (−1607); chr2:177016506-177016594/HOXD4 (+437); chr2:177017192-
177017269/HOXD3 (−11574), HOXD4 (+1118); chr2:177022563-177022645/HOXD3 (−6201), HOXD4 (+6491);
chr2:177024768-177024835/HOXD3 (−4003); chr2:177025058-177025197/HOXD3 (−3677); chr2:177027439-17
7027475/HOXD3 (−1348); chr2:177027834-177027930/HOXD3 (−923); chr2:177029654-177029847/HOXD3 (+9
46); chr2:177030227-177030287/HOXD1 (−23050), HOXD3 (+1452); chr2:177036363-177036880/HOXD1 (−166
85), HOXD3 (+7817); chr2:177040152-177040225/HOXD1 (−13118), HOXD3 (+11384); chr2:177042803-17704
2913/HOXD1 (−10449), HOXD3 (+14053); chr2:177043194-177043220/HOXD1 (−10100), HOXD3 (+14402); chr
2:177053435-177053618/HOXD1 (+220); chr2177053762-177053846/HOXD1 (+497); chr2:177053954-177053
999/HOXD1 (+670); chr2:177054495-177054648/MTX2 (−79551), HOXD1 (+1265); chr2:177873450-177873566/
HNRNPA3 (−203914), MTX2 (+739385); chr2:179060032-179060095/OSBPL6 (+856); chr2:179315947-179315
976/DFNB59 (−201), PRKRA (−4); chr2:180129078-180129185/SESTD1 (+218); chr2:180871633-180871654/C
WC22 (+136); chr2:181844791-181844867/UBE2E3 (−283); chr2:181845374-181845393/UBE2E3 (+272); chr2:
181845773-181845792/UBE2E3 (+671); chr2:182321838-182322038/ITGA4 (+319); chr2:182322192-1823223
99/ITGA4 (+677); chr2:182545948-182546001/NEUROD1 (−583); chr2:182546535-182546599/NEUROD1 (−117
5); chr2:182547388-182547437/NEUROD1 (−2021); chr2:182547932-182548061/NEUROD1 (−2605); chr2:1825
48789-182548819/NEUROD1 (−3412); chr2:182549026-182549037/NEUROD1 (−3640); chr2:182550007-18255
0053/NEUROD1 (−4638); chr2:183731332-183731466/FRZB (+99); chr2:183902402-183902442/NCKAP1 (+80
7); chr2:183903010-183903037/NCKAP1 (+205); chr2:191045194-191045258/MSTN (−117771), HIBCH (+1395
45); chr2:191184536-191184570/HIBCH (+218); chr2:191745125-191745184/GLS (−392); chr2:191884945-191
884987/STAT1 (−5990), STAT4 (+131356); chr2:191885316-191885345/STAT1 (−6355), STAT4 (+130991); chr
2:192110556-192110584/MYO1B (+463); chr2:193059318-193059344/TMEFF2 (+313); chr2:193059549-19305
9661/TMEFF2 (+39); chr2:197664225-197664264/GTF3C3 (+247); chr2:198380734-198380792/HSPE1-MOB4
(+16042), RFTN2 (+159821); chr2:198569960-198569977/MARS2 (−59); chr2:198570083-198570108/MARS2
(+68); chr2:198650908-198651001/BOLL (−17); chr2:198669051-198669112/PLCL1 (−344); chr2:200327254-200
327293/SATB2 (+2557); chr2:200327452-200327575/SATB2 (+2317); chr2:200328685-200328877/SATB2 (+1
050); chr2:200329394-200329432/SATB2 (+418); chr2:200330872-200330907/SATB2 (−1059); chr2:200333759-
200333800/SATB2 (−3949); chr2:200334426-200334504/SATB2 (−4634); chr2:200335452-200335591/SATB2
(−5691), FONG (+380374); chr2:201374663-201374677/KCTD18 (+122); chr2:201450922-201451013/AOX1 (+2
37); chr2:201728922-201728962/CLK1 (+525); chr2:201981462-201981485/CFLAR (+597); chr2:202316252-20
2316318/STRADB (−107), TRAK2 (+34); chr2:202507324-202507367/TMEM237 (+878); chr2:202508108-20250
8147/TMEM237 (+96); chr2:202646120-202646140/ALS2 (−235); chr2:202900051-202900071/FZD7 (+751); chr
2:205409970-205410026/PARD3B (−518); chr2:206549845-206549882/NRP2 (+2640), INO80D (+401042); chr
2:206550818-206550889/NRP2 (+3630), INO80D (+400052); chr2:206551015-206551071/NRP2 (+3819), INO8
0D (+399863); chr2:206551363-206551450/NRP2 (+4183), INO80D (+399499); chr2:207139155-207139217/Z
DBF2 (−337); chr2:207307478-207307547/ADAM23 (−855); chr2:208395895-208395934/CREB1 (+1299), METT
L21A (+94058); chr2:208546288-208546339/METTL21A (−56341), CCNYL1 (−29950); chr2:208634663-208634
701/FZD5 (−539); chr2:208989065-208989293/CRYGD (+134); chr2:209224515-209224574/PTH2R (−47011), P
IKFYVE (+93554); chr2:209271337-209271663/PTH2R (−56); chr2:209271888-209271949/PTH2R (+363); chr2:
210636382-210636429/UNC80 (−311); chr2:210636690-210636737/UNC80 (−3); chr2:210636877-210636933/U
NC80 (+188); chr2:211089487-211089524/ACADL (+709); chr2:217236188-217236231/MARCH4 (+540); chr2:
217498269-217498283/IGFBP2 (+149); chr2:218650360-218650426/TNP1 (−925611), TNS1 (+158403); chr2:2
19232113-219232221/TMBIM1 (−74887), SLC11A1 (−14585); chr2:219232560-219232655/TMBIM1 (−75328), S
LC11A1 (−14144); chr2:219233607-219233652/TMBIM1 (−76350), SLC11A1 (−13122); chr2:219264531-219264
572/CTDSP1 (+74); chr2:219271337-219271395/VIL1 (−12472), CTDSP1 (+6888); chr2:219738412-219738596/
WNT10A (−6751), WNT6 (+13958); chr2:219825093-219825130/CDK5R2 (+714); chr2:219846871-219846894/
FEV (+3496), CDK5R2 (+22485); chr2:219848892-219848935/FEV (+1465), CDK5R2 (+24516); chr2:21985773
8-219857780/CRYBA2 (+368); chr2:219922230-219922497/CCDC108 (−16119), IHH (+2874); chr2:219924393-
219924438/IHH (+822); chr2:220025097-220025161/NHEJ1 (+458); chr2:220071383-220071429/ZFAND2B (−1
32); chr2:220083645-220083700/ABCB6 (+1501), ZFAND2B (+12135); chr2:220143946-220144004/DNAJB2
(−65); chr2:220159796-220159848/PTPRN (+14473), DNAJB2 (+15782); chr2:220173611-220173681/PTPRN
(+649); chr2:220174037-220174059/PTPRN (+247); chr2:220223700-220223794/RESP18 (−25848), DNPEP (+28
915); chr2:220253314-220253362/DNPEP (−676); chr2:220283131-220283172/DES (+53); chr2:220283290-220
283362/DES (+227); chr2:220283626-220283711/DES (+570); chr2:220299635-220299885/SPEG (+60); chr2:2
20313141-220313446/GMPPA (−50293), SPEG (+13594); chr2:220313677-220313727/GMPPA (−49885), SPE
G (+14002); chr2:220313910-220313944/GMPPA (−49660), SPEG (+14227); chr2:220348984-220349054/GMP
PA (−14568), SPEG (+49319); chr2:220361546-220361627/GMPPA (−2000); chr2:220361902-220361983/GMP
PA (−1644); chr2:220362400-220362444/GMPPA (−1165); chr2:220362756-220362787/GMPPA (−815); chr2:22
0387213-220387271/ACCN4 (+8350), CHPF (+21245); chr2:220493870-220493936/SLC4A3 (+1611); chr2:223
159806-223159868/EPHA4 (−722827), PAX3 (+3878); chr2:223160202-223160250/EPHA4 (−723216), PAX3
(+3489); chr2:223161685-223161806/EPHA4 (−724736), PAX3 (+1969); chr2:223162891-223162928/PAX3 (+805);
chr2:223163225-223163472/PAX3 (+366); chr2:223165841-223165871/PAX3 (−2141); chr2:223166226-2231
66293/PAX3 (−2545); chr2:223168832-223168916/SGPP2 (−120448), PAX3 (−5159); chr2:223175695-22317574
5/SGPP2 (−113602), PAX3 (−12005); chr2:223176512-223176719/SGPP2 (−112706), PAX3 (−12901); chr2:2231
77208-223177244/SGPP2 (−112096), PAX3 (−13511); chr2:225906779-225906790/DOCK10 (+545); chr2:22590
7362-225907439/DOCK10 (−71); chr2:228029351-228029372/COL4A4 (−87), COL4A3 (+81); chr2:228582796-2
28582819/SLC19A3 (−63); chr2:228736296-228736335/CCL20 (+57758), SPHKAP (+310045); chr2:229046745-
229046803/SPHKAP (−413); chr2:230579343-230579375/DNER (−73); chr2:230579856-230579910/DNER (−59
7); chr2:230933429-230933493/SLC16A14 (+254); chr2:231855584-231855597/GPR55 (−65650), SPATA3 (−52
48); chr2:232055534-232055613/HTR2B (−65750), ARMC9 (−7768); chr2:232236066-232236125/B3GNT7 (−242
39), ARMC9 (+172754); chr2:232253186-232253251/B3GNT7 (−7116), ARMC9 (+189877); chr2:232260942-23
2260984/B3GNT7 (+628); chr2:232395022-232395054/NMUR1 (+144); chr2:232645692-232645729/PDE6D
(+263); chr2:233216688-233216695/ALPP (−26656), DIS3L2 (+390399); chr2:233350540-233350843/ECEL1 (+18
40), ALPI (+29859); chr2:233351279-233351415/ECEL1 (+1185), ALPI (+30514); chr2:233351734-233351789/
ECEL1 (+770); chr2:233352007-233352101/ECEL1 (+478); chr2:233352452-233352506/ECEL1 (+53); chr2:23
3352763-233352775/ECEL1 (−237); chr2:233498180-233498345/EFHD1 (+56); chr2:233498527-233498571/EF
HD1 (+342); chr2:233498874-233498895/EFHD1 (+678); chr2:233499345-233499385/GIGYF2 (−62650), EFHD
1 (+1158); chr2:233756005-233756150/C2orf82 (+21084), NGEF (+121873); chr2:233793223-233793480/C2orf
82 (+58358), NGEF (+84599); chr2:233925164-233925278/INPP5D (+185); chr2:233928607-233928760/ATG1
6L1 (−231533), INPP5D (+3648); chr2:233949316-233949409/ATG16L1 (−210854), INPP5D (+24327); chr2:234
262733-234262773/DGKD (−400); chr2:234475246-234475309/USP40 (−1042); chr2:234475412-234475473/US
P40 (−1207); chr2:234674909-234674929/HEATR7B1 (−62282), UGT1A1 (+6000); chr2:234763024-234763063/
HJURP (+168); chr2:234847791-234847855/SPP2 (−111523), TRPM8 (+21780); chr2:235404533-235404550/A
RL4C (+1151), SPP2 (+445196); chr2:236163957-236164001/AGAP1 (−238754), SH3BP4 (+303351); chr2:236
401803-236401897/AGAP1 (−883); chr2:236579293-236579497/AGAP1 (+176662), GBX2 (+497257); chr2:236
579598-236579694/AGAP1 (+176913), GBX2 (+497006); chr2:236579804-236579913/AGAP1 (+177126), GBX
2 (+496793); chr2:236962012-236962058/GBX2 (+114617), AGAP1 (+559302); chr2:237067666-237067694/G
BX2 (+8972), AGAP1 (+664947); chr2:237068094-237068146/GBX2 (+8532), AGAP1 (+665387); chr2:2370685
53-237068626/GBX2 (+8062), AGAP1 (+665857); chr2:237068994-237069133/GBX2 (+7588), AGAP1 (+66633
1); chr2:237071724-237072007/GBX2 (+4786), AGAP1 (+669133); chr2:237072323-237072393/GBX2 (+4294),
AGAP1 (+669625); chr2:237072601-237072641/GBX2 (+4031), AGAP1 (+669888); chr2:237073015-23707305
6/GBX2 (+3616), AGAP1 (+670303); chr2:237073496-237073564/GBX2 (+3122), AGAP1 (+670797); chr2:2370
74563-237074633/GBX2 (+2054), AGAP1 (+671865); chr2:237076636-237076656/GBX2 (+6); chr2:237077006-
237077033/GBX2 (−368); chr2:237077240-237077284/GBX2 (−610); chr2:237078703-237078732/GBX2 (−2066);
chr2:237081554-237081748/GBX2 (−4999); chr2:237082263-237082343/GBX2 (−5651), ASB18 (+90685); chr
2:237145749-237145963/GBX2 (−69204), ASB18 (+27132); chr2:237415955-237416070/IQCA1 (+79); chr2:238
396154-238396164/MLPH (+281); chr2:238535731-238535875/LRRFIP1 (−65004), RAB17 (−36034); chr2:2385
35985-238536004/LRRFIP1 (−64812), RAB17 (−36226); chr2:238600057-238600103/LRRFIP1 (−727); chr2:238
864631-238864726/UBE2F (−10908), RAMP1 (+96492); chr2:239072391-239072429/FAM132B (−223); chr2:23
9130005-239130042/ILKAP (−17700), HES6 (+18657); chr2:239139910-239140138/ILKAP (−27700), HES6 (+86
57); chr2:239143049-239143122/ILKAP (−30762), HES6 (+5595); chr2:239755198-239755413/TWIST2 (−1367);
chr2:239755659-239755668/TWIST2 (−1009); chr2:239756066-239756230/TWIST2 (−525); chr2:239756463-23
9756487/TWIST2 (−198); chr2:239756608-239756633/TWIST2 (−52); chr2:239756765-239756815/TWIST2 (+11
7); chr2:239757731-239757898/TWIST2 (+1142), HDAC4 (+564828); chr2:239758061-239758125/TWIST2 (+1
420), HDAC4 (+564550); chr2:239836625-239836700/TWIST2 (+79990), HDAC4 (+485980); chr2:240188997-2
40189050/HDAC4 (+133619), TWIST2 (+432351); chr2:240302575-240302617/HDAC4 (+20047), TWIST2 (+54
5923); chr2:240754392-240754468/HDAC4 (−431787), NDUFA10 (+210389); chr2:241375642-241375691/GPC
1 (+552); chr2:241393167-241393198/GPC1 (+18068), ANKMY1 (+104222); chr2:241393815-241394001/GPC
1 (+18793), ANKMY1 (+103497); chr2:241395263-241395453/GPC1 (+20243), ANKMY1 (+102047); chr2:2415
00005-241500039/ANKMY1 (−2617), DUSP28 (+551); chr2:241505187-241505272/RNPEPL1 (−2774); chr2:241
612445-241612516/AQP12B (+9836), GPR35 (+47819); chr2:241759008-241759042/KIF1A (+700); chr2:24185
5419-241855455/SNED1 (−82818), AGXT (+47275); chr2:241855730-241855768/SNED1 (−82506), AGXT (+47
587); chr2:241855999-241856135/SNED1 (−82188), AGXT (+47905); chr2:241905139-241905250/SNED1 (−330
60), AGXT (+97033); chr2:242143870-242143956/ANO7 (+15989), HDLBP (+68333); chr2:242480994-2424814
37/STK25 (−33182), BOK (−16930); chr2:242640669-242640751/ING5 (−746); chr2:242674490-242674559/D2H
GDH (+495); chr2:242743101-242743395/NEU4 (−6912), GAL3ST2 (+27008); chr2:242744064-242744112/NE
U4 (−6072), GAL3ST2 (+27848); chr2:242744471-242744588/NEU4 (−5630), GAL3ST2 (+28290); chr2:2427595
31-242759692/NEU4 (+9452), PDCD1 (+41446); chr2:242784909-242785075/PDCD1 (+16066), NEU4 (+34832);
chr2:242805778-242805890/PDCD1 (−4776); chr20:291163-291220/SOX12 (−15047), ZCCHC3 (+12988); chr
20:590599-590871/TCF15 (+175); chr20:591075-591135/TCF15 (−195); chr20:592560-592730/TCF15 (−1735);
chr20:634328-634362/SRXN1 (−455); chr20:644352-644406/SRXN1 (−10489), SCRT2 (+12444); chr20:644826-
644985/SRXN1 (−11016), SCRT2 (+11917); chr20:708902-708944/SCRT2 (−52100), C20orf54 (+40305); chr20:
822197-822314/FAM110A (+7900), ANGPT4 (+74704); chr20:822900-822973/FAM110A (+8581), ANGPT4 (+7
4023); chr20:826022-826132/FAM110A (+11721), ANGPT4 (+70883); chr20:1784306-1784369/SIRPG (−14591
3), SIRPA (−91087); chr20:1851911-1852013/SIRPG (−213537), SIRPA (−23463); chr20:1874484-1874648/SIRP
A (−859); chr20:1875120-1875155/SIRPA (−287); chr20:1946353-1946430/PDYN (+28002), SIRPA (+70967); ch
r20:2539133-2539193/NOP56 (−94015), TMC2 (+21910); chr20:2633168-2633217/NOP56 (+15); chr20:267376
6-2673832/EBF4 (+275); chr20:2674457-2674614/EBF4 (+1012), CPXM1 (+106756); chr20:2730186-2730195/
CPXM1 (+51101), EBF4 (+56667); chr20:2731244-2731391/CPXM1 (+49974), EBF4 (+57794); chr20:2785867-
2785955/CPXM1 (−4619); chr20:2801733-2801857/TMEM239 (+4819), FAM113A (+19537); chr20:3052306-30
52396/OXT (+85); chr20:3063005-3063059/AVP (+2338), OXT (+10766); chr20:3063827-3063846/AVP (+1533),
OXT (+11571); chr20:3064000-3064058/AVP (+1341), OXT (+11763); chr20:3073392-3073560/AVP (−8106),
UBOX5 (+67064); chr20:3074094-3074226/AVP (−8790), UBOX5 (+66380); chr20:3204137-3204229/ITPA (+14
127), SLC4A11 (+14652); chr20:3229480-3229526/ATRN (−222162), SLC4A11 (−10668); chr20:3387181-33872
58/SLC4A11 (−168385), ATRN (−64445); chr20:3388355-3388397/SLC4A11 (−169541), ATRN (−63289); chr20:3
389372-3389571/SLC4A11 (−170637), ATRN (−62193); chr20:3641225-3641310/GFRA4 (+2778), ATRN (+1896
03); chr20:3641548-3641773/GFRA4 (+2385), ATRN (+189996); chr20:3653133-3653532/GFRA4 (−9287), ADA
M33 (+9405); chr20:3801152-3801162/C20orf29 (−14); chr20:3869459-3869510/PANK2 (−257); chr20:3869921-
3869944/PANK2 (+191); chr20:4135706-4135816/SMOX (+6311), ADRA1D (+93898); chr20:4142684-4142806/
SMOX (+13295), ADRA1D (+86914); chr20:4741367-4741409/PRND (+38832), RASSF2 (+54381); chr20:5297
048-5297225/PROKR2 (−2114); chr20:5297419-5297672/PROKR2 (−2523); chr20:6750700-6750925/BMP2 (+2
068); chr20:8000360-8000516/TMX4 (−45); chr20:9487146-9487211/LAMP5 (−7826), PLCB4 (+198732); chr20:
9487720-9487788/LAMP5 (−7251), PLCB4 (+199307); chr20:9488282-9488328/LAMP5 (−6700), PLCB4 (+1998
58); chr20:9496531-9496580/LAMP5 (+1551), PAK7 (+323131); chr20:9819324-9819466/PAK7 (+292); chr20:9
819788-9819833/PAK7 (−124); chr20:10198731-10198940/SNAP25 (−641); chr20:10200115-10200153/SNAP25
(+657); chr20:10200327-10200350/SNAP25 (+862); chr20:11667702-11667739/NONE; chr20:11667938-11667
967/NONE; chr20:13975729-13975784/SEL1L2 (−4495), MACROD2 (−389); chr20:17208657-17208739/PCSK2
(+1101), BFSP1 (+303315); chr20:17661972-17661995/RRBP1 (+944); chr20:17840265-17840349/SNX5 (+10
8847), BANF2 (+165987); chr20:18038167-18038209/OVOL2 (+333); chr20:18038338-18038356/OVOL2 (+174);
chr20:19739352-19739431/RIN2 (−127773), SLC24A3 (+546102); chr20:19739566-19739612/RIN2 (−127576),
SLC24A3 (+546299); chr20:20345631-20346136/INSM1 (−2881); chr20:20347710-20347736/INSM1 (−1042); c
hr20:20348222-20348257/INSM1 (−525); chr20:20433164-20433287/INSM1 (+84461), RALGAPA2 (+260040);
chr20:20692981-20693043/RALGAPA2 (+254); chr20:21000901-21001131/RALGAPA2 (−307750), PLK1S1 (−1
05608); chr20:21080957-21081028/RALGAPA2 (−387727), PLK1S1 (−25631); chr20:21081853-21082009/RALG
APA2 (−388665), PLK1S1 (−24693); chr20:21082124-21082215/RALGAPA2 (−388904), PLK1S1 (−24454); chr20:
21085711-21085767/RALGAPA2 (−392473), PLK1S1 (−20885); chr20:21086152-21086194/RALGAPA2 (−3929
07), PLK1S1 (−20451); chr20:21283859-21283912/XRN2 (−56); chr20:21372193-21372294/NKX2-4 (+5803), XR
N2 (+88302); chr20:21376429-21376589/NKX2-4 (+1538), XRN2 (+92567); chr20:21376734-21376876/NKX2-4
(+1242), XRN2 (+92863); chr20:21377129-21377473/NKX2-4 (+746); chr20:21377641-21377737/NKX2-4 (+35
8); chr20:21377935-21378153/NKX2-4 (+3); chr20:21486660-21486785/NKX2-4 (−108676), NKX2-2 (+7941); ch
r20:21486917-21486954/NKX2-4 (−108889), NKX2-2 (+7728); chr20:21488514-21488591/NKX2-4 (−110506), N
KX2-2 (+6111); chr20:21489159-21489239/NKX2-4 (−111152), NKX2-2 (+5465); chr20:21489447-21489621/NK
X2-4 (−111487), NKX2-2 (+5130); chr20:21490763-21490814/NKX2-4 (−112742), NKX2-2 (+3875); chr20:21491
723-21491742/NKX2-4 (−113686), NKX2-2 (+2931); chr20:21492263-21492308/NKX2-4 (−114239), NKX2-2 (+2
378); chr20:21492410-21492507/NKX2-4 (−114412), NKX2-2 (+2205); chr20:21492826-21492990/NKX2-4 (−114
861), NKX2-2 (+1756); chr20:21493994-21494360/NKX2-2 (+487); chr20:21496478-21496683/NKX2-2 (−1917);
chr20:21499106-21499132/NKX2-2 (−4455); chr20:21501360-21501444/PAX1 (−184895), NKX2-2 (−6738); chr2
0:21502145-21502443/PAX1 (−184003), NKX2-2 (−7630); chr20:21502700-21502837/PAX1 (−183528), NKX2-2
(−8105); chr20:21503208-21503230/PAX1 (−183078), NKX2-2 (−8555); chr20:21682329-21682361/PAX1 (−3952);
chr20:21683772-21683899/PAX1 (−2461); chr20:21684210-21684347/PAX1 (−2018); chr20:21685833-216858
86/PAX1 (−437); chr20:21687383-21687755/PAX1 (+1272), FOXA2 (+877532); chr20:21695274-21695305/PAX
1 (+8993), FOXA2 (+869811); chr20:22549141-22549193/FOXA2 (+15934), PAX1 (+862870); chr20:22562509-
22562568/FOXA2 (+2562), PAX1 (+876242); chr20:22562886-22563238/FOXA2 (+2039), PAX1 (+876765); chr
20:22563636-22563663/FOXA2 (+1451), PAX1 (+877353); chr20:22565602-22565634/FOXA2 (−517); chr20:22
567565-22567605/FOXA2 (−2484); chr20:22567834-22567876/FOXA2 (−2754); chr20:23015769-23015818/SST
R4 (−263); chr20:23016007-23016088/SSTR4 (−9); chr20:23028641-23028676/THBD (+1642), SSTR4 (+12602);
chr20:23029240-23029588/THBD (+887); chr20:23030086-23030291/THBD (+112); chr20:23066831-2306687
4/CD93 (+124); chr20:23067125-23067169/CD93 (−170); chr20:23338777-23338824/GZF1 (−6199), NXT1 (+74
28); chr20:23636302-23636380/CST3 (−17767), CST4 (+33321); chr20:23636687-23636782/CST3 (−18161), CS
T4 (+32927); chr20:24449703-24449759/SYNDIG1 (−104); chr20:24450704-24450819/SYNDIG1 (+927); chr20:
24854038-24854121/CST7 (−75786), SYNDIG1 (+404245); chr20:24929953-24930019/CST7 (+120); chr20:249
33797-24933921/CST7 (+3993), C20orf3 (+39566); chr20:25061789-25061978/VSX1 (+883); chr20:25062312-
25062510/VSX1 (+356); chr20:25062646-25062707/VSX1 (+90); chr20:25062818-25062870/VSX1 (−77); chr20:
25063907-25063993/VSX1 (−1183); chr20:25128881-25129058/VSX1 (−66203), ENTPD6 (−47369); chr20:25129
183-25129464/VSX1 (−66557), ENTPD6 (−47015); chr20:25371487-25371510/ABHD12 (+119); chr20:25566394-
25566411/NINL (−250); chr20:25604400-25604445/NANP (+225); chr20:25677583-25677622/ZNF337 (−134); c
hr20:25848703-25848718/ZNF337 (−171242); chr20:26188962-26189212/ZNF337 (−511618); chr20:26257594-
26257636/ZNF337 (−580146); chr20:29535006-29535084/DEFB115 (−310422); chr20:30102627-30102687/HM1
3 (+416); chr20:30249547-30249563/COX4I2 (+23864), BCL2L1 (+61101); chr20:30437621-30437640/FOXS1
(−4211); chr20:30458664-30458690/DUSP15 (−198), TTLL9 (+172); chr20:30946154-30946218/ASXL1 (+39); ch
r20:30946330-30946345/ASXL1 (+191); chr20:31062760-31062860/ASXL1 (+116663), C20orf203 (+176973); c
hr20:31070581-31070611/ASXL1 (+124449), C20orf203 (+169187); chr20:31097644-31097712/C20orf203 (+14
2105), ASXL1 (+151531); chr20:31116214-31116258/C20orf203 (+123547), ASXL1 (+170089); chr20:3116256
8-31162605/C20orf203 (+77196), ASXL1 (+216440); chr20:31168763-31168842/C20orf203 (+70980), ASXL1
(+222656); chr20:32031042-32031066/SNTA1 (+644); chr20:32255691-32255738/NECAB3 (+6549), CBFA2T2
(+177787); chr20:32400121-32400177/RALY (−181309), CHMP4B (+1039); chr20:32699820-32699881/EIF2S2
(+234); chr20:32803934-32803954/EIF2S2 (−103859), ASIP (−44227); chr20:32856888-32856951/ASIP (+8749),
AHCY (+34295); chr20:32951702-32951741/ITCH (+660); chr20:33064157-33064227/DYNLRB1 (−40012), ITC
H (+113130); chr20:33292376-33292469/TP53INP2 (+275); chr20:33813615-33813680/MMP24 (−891); chr20:3
4188632-34188747/FER1L4 (−15492), SPAG4 (−15119); chr20:34189089-34189166/FER1L4 (−15930), SPAG4
(−14681); chr20:34189492-34189679/FER1L4 (−16388), SPAG4 (−14223); chr20:34190131-34190145/FER1L4
(−16940), SPAG4 (−13671); chr20:34894429-34894563/DLGAP4 (−100952), EPB41L1 (+151834); chr20:3489474
3-34894784/DLGAP4 (−100684), EPB41L1 (+152102); chr20:34894907-34894954/DLGAP4 (−100517), EPB41L
1 (+152269); chr20:35089168-35089229/MYL9 (−80698), DLGAP4 (+93751); chr20:35169875-35169891/MYL9
(−14); chr20:35201585-35201647/TGIF2 (−260); chr20:35491100-35491258/DSN1 (−89025), SAMHD1 (+89067);
chr20:35579528-35579567/SAMHD1 (+698); chr20:35807829-35807869/C20orf132 (+125), RPN2 (+393); chr2
0:35974583-35974600/SRC (+35); chr20:36012804-36012910/NNAT (−136750), SRC (+38300); chr20:3601333
8-36013404/NNAT (−136236), SRC (+38814); chr20:36662484-36662527/TTI1 (−673); chr20:36889339-368893
74/TGM2 (−95657), BPI (−43195); chr20:37352516-37352606/SLC32A1 (−544); chr20:37353719-37353806/SLC
32A1 (+658); chr20:37354832-37354993/ACTR5 (−22184), SLC32A1 (+1808); chr20:37356043-37356168/ACT
R5 (−20991), SLC32A1 (+3001); chr20:37356828-37357215/ACTR5 (−20075), SLC32A1 (+3917); chr20:374343
53-37434488/PPP1R16B (+73); chr20:37434722-37434736/PPP1R16B (+381); chr20:37434894-37434930/PP
P1R16B (+564); chr20:37435370-37435487/FAM83D (−119526), PPP1R16B (+1081); chr20:37590350-3759041
9/DHX35 (−596); chr20:39311410-39311501/MAFB (+6420); chr20:39311813-39311890/MAFB (+6024); chr20:3
9312133-39312316/MAFB (+5651); chr20:39315625-39315685/MAFB (+2221); chr20:39316853-39316983/MA
FB (+958); chr20:39319204-39319514/MAFB (−1483); chr20:39968471-39968499/LPIN3 (−1075); chr20:399947
31-39994762/EMILIN3 (+751); chr20:39995911-39995970/EMILIN3 (−443); chr20:41817916-41818007/PTPRT
(+595); chr20:41818749-41818804/PTPRT (−220); chr20:42087042-42087060/SRSF6 (+547); chr20:42544534-4
2544727/TOX2 (+1139), JPH2 (+271587); chr20:42744647-42744693/JPH2 (+71548), TOX2 (+201178); chr20:
42744853-42744894/JPH2 (+71344), TOX2 (+201382); chr20:43160380-43160428/PKIG (−32); chr20:4327974
5-43279792/ADA (+607); chr20:43438086-43438334/RIMS4 (+769); chr20:43439219-43439247/RIMS4 (−254);
chr20:43540201-43540234/PABPC1L (+1515), TOMM34 (+48896); chr20:43726630-43726764/KCNS1 (+3056),
STK4 (+131577); chr20:43727118-43727132/KCNS1 (+2628), STK4 (+132005); chr20:43727254-43727272/K
CNS1 (+2490), STK4 (+132143); chr20:43729577-43729807/KCNS1 (+61); chr20:43921804-43921824/SLPI (−3
8608), RBPJL (−13677); chr20:43935459-43935498/RBPJL (−12); chr20:43945277-43945376/MATN4 (−8360), S
DC4 (+31737); chr20:44421342-44421366/WFDC3 (−807), DNTTIP1 (+778); chr20:44452579-44452665/TNNC2
(+3331), UBE2C (+11367); chr20:44639746-44639846/SLC12A5 (−10533), MMP9 (+2249); chr20:44640288-44
640312/SLC12A5 (−10029), MMP9 (+2753); chr20:44641134-44641192/SLC12A5 (−9166), MMP9 (+3616); chr2
0:44642369-44642404/SLC12A5 (−7942), MMP9 (+4840); chr20:44657840-44657944/SLC12A5 (+7563), NCOA
5 (+60688); chr20:44658302-44658361/SLC12A5 (+8003), NCOA5 (+60248); chr20:44686037-44686422/NCO
A5 (+32350), SLC12A5 (+35901); chr20:44686615-44686627/NCOA5 (+31959), SLC12A5 (+36292); chr20:446
87236-44687495/NCOA5 (+31214), SLC12A5 (+37037); chr20:44718363-44718419/NCOA5 (+189); chr20:447
28168-44728389/CD40 (−18627), NCOA5 (−9699); chr20:44803126-44803172/CD40 (+56243), CDH22 (+77183);
chr20:44879791-44880040/CDH22 (+416); chr20:44880167-44880275/CDH22 (+111); chr20:44936065-4493
6314/CDH22 (−55858), SLC35C2 (+56874); chr20:44936471-44936608/CDH22 (−56208), SLC35C2 (+56524); c
hr20:44937412-44937425/CDH22 (−57087), SLC35C2 (+55645); chr20:45034805-45034864/ELMO2 (+436); chr
20:45142039-45142151/ZNF334 (+99); chr20:45279982-45280039/SLC13A3 (+89); chr20:46356893-46356967/
SULF2 (+57878), NCOA3 (+226329); chr20:47443937-47443944/PREX1 (+479); chr20:47444428-47444452/P
REX1 (−20); chr20:47444581-47444609/PREX1 (−175); chr20:47444793-47444920/PREX1 (−437); chr20:47803
424-47803464/STAU1 (+1460), CSE1L (+140606); chr20:47836233-47836277/DDX27 (+423); chr20:48099294-
48099322/KCNB1 (−125); chr20:48184292-48184328/PTGIS (+397); chr20:48314715-48314807/PTGIS (−13005
4), B4GALT5 (+15660); chr20:48664925-48665027/SNAI1 (+65463), TMEM189-UBE2V1 (+105359); chr20:486
77258-48677314/SNAI1 (+77773), TMEM189-UBE2V1 (+93049); chr20:49127262-49127302/PTPN1 (+391); ch
r20:49307777-49307867/PARD6B (−40259), PTPN1 (+180931); chr20:49308020-49308045/PARD6B (−40048),
PTPN1 (+181142); chr20:49411898-49411929/BCAS4 (+447); chr20:49639185-49639217/KCNG1 (+474); chr2
0:49639857-49639882/KCNG1 (−195); chr20:49639997-49640094/KCNG1 (−371); chr20:49640348-49640409/K
CNG1 (−704); chr20:50109098-50109342/KCNG1 (−469545), NFATC2 (+50038); chr20:50418755-50418770/SA
LL4 (+285); chr20:50721201-50721234/SALL4 (−302170), ZFP64 (+87306); chr20:51588647-51588685/TSHZ2
(−280); chr20:52789949-52790081/CYP24A1 (+501); chr20:53092533-53092686/DOK5 (+344); chr20:53092868-
53092912/DOK5 (+624); chr20:54578974-54579139/CBLN4 (+955); chr20:54579959-54580069/CBLN4 (−2); c
hr20:54580522-54580621/CBLN4 (−560); chr20:54919226-54919287/FAM210B (−14726), MC3R (+95469); chr2
0:54934105-54934121/FAM210B (+130); chr20:55200311-55200615/TFAP2C (−3895); chr20:55201452-552015
80/TFAP2C (−2842); chr20:55202069-55202325/TFAP2C (−2161); chr20:55203438-55203505/TFAP2C (−886); c
hr20:55203669-55203806/TFAP2C (−620); chr20:55205789-55206293/TFAP2C (+1683), BMP7 (+635666); chr2
0:55206430-55206463/TFAP2C (+2089), BMP7 (+635260); chr20:55206598-55206736/TFAP2C (+2309), BMP
7 (+635040); chr20:55500347-55500405/TFAP2C (+296018), BMP7 (+341331); chr20:55500721-55501052/TF
AP2C (+296529), BMP7 (+340820); chr20:55532780-55532850/BMP7 (+308892), TFAP2C (+328457); chr20:5
5839668-55839692/BMP7 (+2027), TFAP2C (+635322); chr20:55840246-55840279/BMP7 (+1444), TFAP2C
(+635905); chr20:55841990-55842055/BMP7 (−316); chr20:55964916-55964997/RBM38 (−1497); chr20:55965169-
55965308/RBM38 (−1215); chr20:55965703-55965803/RBM38 (−701); chr20:56056599-56056674/CTCFL (+43
546), RBM38 (+90183); chr20:56196092-561 96223/ZBP1 (−526); chr20:56725875-56725919/PMEPA1 (−440866),
PPP4R1L (+158598); chr20:56732732-56732867/PMEPA1 (−447769), PPP4R1L (+151695); chr20:56785320-
56785406/PMEPA1 (−500332), PPP4R1L (+99132); chr20:56964032-56964080/VAPB (−119); chr20:57089460-
57090103/APCDD1L (+167); chr20:57224597-57224744/STX16 (−1638); chr20:57225080-57225218/STX16 (−1
160); chr20:57281787-57281821/GNAS (−132991), NPEPL1 (+13942); chr20:581 52372-581 52388/PHACTR3
(−27223), EDN3 (+276881); chr20:58152559-58152775/PHACTR3 (−26936), EDN3 (+277168); chr20:58179995-5
8180213/PHACTR3 (+501); chr20:58180403-58180470/PHACTR3 (+834); chr20:58180576-58180687/PHACTR
3 (+1029), SYCP2 (+326577); chr20:58394704-58394804/SYCP2 (+112455), PHACTR3 (+215151); chr20:5863
1000-58631143/CDH26 (+97601); chr20:58662536-58662587/CDH26 (+129091); chr20:58662841-58662926/C
DH26 (+129413); chr20:59053194-59053253/CDH4 (−774258), CDH26 (+519753); chr20:59827143-59827237/
CDH4 (−292); chr20:59827408-59827417/CDH4 (−69); chr20:59827764-59827920/CDH4 (+360); chr20:5982816
6-59828235/CDH4 (+719); chr20:59828408-59828804/CDH4 (+1124), TAF4 (+812260); chr20:59829213-59829
284/CDH4 (+1767), TAF4 (+811617); chr20:59868948-59869042/CDH4 (+41513), TAF4 (+771871); chr20:6054
0425-60540485/TAF4 (+100411), CDH4 (+712973); chr20:60640796-60640883/TAF4 (+26); chr20:60641030-6
0641047/TAF4 (−173); chr20:60962626-60962687/RPS21 (+536); chr20:60981908-60981936/CABLES2 (+417);
chr20:61008830-61008914/CABLES2 (−26533), GATA5 (+42154); chr20:61049934-61050222/GATA5 (+948); c
hr20:61050351-61050418/GATA5 (+641); chr20:61051176-61051250/GATA5 (−187); chr20:61051437-6105146
9/GATA5 (−427); chr20:61051855-61051879/GATA5 (−841); chr20:61087967-61088125/SLCO4A1 (−185751), G
ATA5 (−37020); chr20:61159233-61159299/SLCO4A1 (−114531), GATA5 (−108240); chr20:61359948-61359978/
C20orf20 (−67842), NTSR1 (+19774); chr20:61493016-61493113/TCFL5 (+50); chr20:61493511-61493534/TC
FL5 (−408); chr20:61557000-61557065/DIDO1 (+870); chr20:61560461-61560528/DIDO1 (−2592); chr20:61569
108-61569156/C20orf11 (−309); chr20:61585923-61585989/SLC17A9 (+1957), BHLHE23 (+52431); chr20:6160
4758-61604777/SLC17A9 (+20769), BHLHE23 (+33619); chr20:61610210-61610287/SLC17A9 (+26250), BHL
HE23 (+28138); chr20:61612348-61612479/BHLHE23 (+25973), SLC17A9 (+28415); chr20:61636335-6163638
1/BHLHE23 (+2029), SLC17A9 (+52359); chr20:61636779-61636875/BHLHE23 (+1560), SLC17A9 (+52828); c
hr20:61637091-61637281/BHLHE23 (+1201), SLC17A9 (+53187); chr20:61637649-61637735/BHLHE23 (+695);
chr20:61637957-61638220/BHLHE23 (+298); chr20:61638470-61638534/BHLHE23 (−115); chr20:61638798-6
1639020/BHLHE23 (−522); chr20:61703466-61703642/BIRC7 (−163722), BHLHE23 (−65167); chr20:61703762-6
1703845/BIRC7 (−163472), BHLHE23 (−65417); chr20:61734088-61734101/BIRC7 (−133181), BHLHE23 (−9570
8); chr20:61808381-61808666/BHLHE23 (−170137), BIRC7 (−58752); chr20:61809006-61809218/BHLHE23 (−17
0725), BIRC7 (−58164); chr20:61809632-61809840/BHLHE23 (−171349), BIRC7 (−57540); chr20:61810135-618
10159/BHLHE23 (−171760), BIRC7 (−57129); chr20:61810557-61810632/BHLHE23 (−172208), BIRC7 (−56681);
chr20:61885103-61885195/NKAIN4 (+743); chr20:61885551-61885777/NKAIN4 (+228); chr20:61886204-61886
256/NKAIN4 (−338); chr20:61992271-61992532/CHRNA4 (+293); chr20:61992636-61992674/CHRNA4 (+40); c
hr20:62102664-62102699/CHRNA4 (−109987), KCNQ2 (+1311); chr20:62103626-62103667/KCNQ2 (+346); chr
20:62131025-62131120/EEF1A2 (−568); chr20:62152341-62152366/PPDPF (+221); chr20:62198818-62198930/
SRMS (−20017), PRIC285 (+6718); chr20:62199538-62199644/SRMS (−20734), PRIC285 (+6001); chr20:6220
5754-62205804/PRIC285 (−187); chr20:62259221-62259259/GMEB2 (−859); chr20:62272683-62272797/GMEB
2 (−14359), STMN3 (+12040); chr20:62338742-62338766/ZGPAT (−626), ARFRP1 (+601); chr20:62339118-623
39163/ZGPAT (−239), ARFRP1 (+214); chr20:62369728-62369771/SLC2A4RG (−1461); chr20:62525611-62525
692/DNAJC5 (−803); chr20:62572980-62573066/UCKL1 (+14777), DNAJC5 (+46568); chr20:62573214-625733
44/UCKL1 (+14521), DNAJC5 (+46824); chr20:62579648-62579705/UCKL1 (+8123), DNAJC5 (+53222); chr20:
62673334-62673410/SOX18 (+7607), PRPF6 (+60941); chr20:62680231-62680421/SOX18 (+653); chr20:6269
4426-62694477/TCEA2 (+6013), RGS19 (+16872); chr20:62696907-62696956/TCEA2 (+8493), RGS19 (+1439
2); chr20:62734130-62734172/NPBWR2 (+4033), OPRL1 (+17782); chr20:62947985-62948007/PCMTD2 (+609
48); chr20:62959203-62959409/PCMTD2 (+72258); chr21:9664665-9664710/TEKT4P2 (+303905); chr21:1961
7111-19617175/CHODL (−7); chr21:19617276-19617418/CHODL (+197); chr21:19617966-19618097/CHODL
(+882); chr21:22369362-22369429/NCAM2 (−1237); chr21:22370225-22370236/NCAM2 (−402); chr21:22370476-
22370552/NCAM2 (−119); chr21:27012121-27012148/JAM2 (+546); chr21:27945148-27945252/CYYR1 (+381);
chr21:27945436-27945604/CYYR1 (+61); chr21:28216583-28216633/CYYR1 (−271027), ADAMTS1 (+1120); ch
r21:28337916-28338026/ADAMTS1 (−120243), ADAMTS5 (+1468); chr21:28338336-28338515/ADAMTS1 (−12
0698), ADAMTS5 (+1013); chr21:28340049-28340062/ADAMTS5 (−617); chr21:30445418-30445475/CCT8 (+5
63); chr21:31311312-31311386/GRIK1 (+933); chr21:31311634-31311700/GRIK1 (+615); chr21:31311920-313
12079/GRIK1 (+282); chr21:32546244-32546314/KRTAP19-8 (−135484), TIAM1 (+385011); chr21:33984233-33
984280/C21orf59 (+661); chr21:34100323-34100461/SYNJ1 (−41); chr21:34392168-34392205/C21orf62 (−2061
34), OLIG2 (−6029); chr21:34392404-34392436/C21orf62 (−206367), OLIG2 (−5796); chr21:34399259-34399441/
OLIG1 (−43100), OLIG2 (+1134); chr21:34400105-34400231/OLIG1 (−42282), OLIG2 (+1952); chr21:34444363-
34444444/IFNAR2 (−157827), OLIG1 (+1954); chr21:34602246-34602267/IFNAR2 (+26); chr21:34602738-346
02763/IFNAR2 (+520); chr21:34852117-34852164/DNAJC28 (+11882), IFNGR2 (+76939); chr21:34960582-349
60632/DONSON (+660); chr21:35446551-35446589/MRPS6 (+747), SLC5A3 (+747); chr21:35575010-3557506
4/KCNE2 (−161286), MRPS6 (+129214); chr21:35747581-35747645/FAM165B (−136); chr21:35831912-358320
03/KCNE1 (−3895); chr21:36041360-36041700/CLIC6 (−158); chr21:36042029-36042091/CLIC6 (+372); chr21:3
6419174-36419236/RUNX1-IT1 (−7482), RUNX1 (+2390); chr21:36900927-36900988/CBR1 (−541327), RUNX1
(−479363); chr21:37502795-37502824/CBR3 (−4453); chr21:38064113-38064248/CLDN14 (−225456), SIM2 (−78
10); chr21:38065523-38065799/CLDN14 (−226936), SIM2 (−6330); chr21:38068230-38068646/SIM2 (−3553); ch
r21:38069806-38069853/SIM2 (−2161); chr21:38070217-38070412/SIM2 (−1676); chr21:38073170-38073239/SI
M2 (+1214), HLCS (+280059); chr21:38073526-38073615/SIM2 (+1580), HLCS (+279693); chr21:38076828-38
077129/SIM2 (+4988), HLCS (+276285); chr21:38077431-38077617/SIM2 (+5533), HLCS (+275740); chr21:38
080063-38080174/SIM2 (+8128), HLCS (+273145); chr21:38080407-38080471/SIM2 (+8448), HLCS (+272825);
chr21:38081340-38081536/SIM2 (+9447), HLCS (+271826); chr21:38082640-38082684/SIM2 (+10671), HLC
S (+270602); chr21:38120538-38120553/SIM2 (+48555), HLCS (+232718); chr21:38338608-38338650/HLCS
(+14635), SIM2 (+266638); chr21:38362391-38362412/DSCR6 (−16461), HLCS (−9138); chr21:38378336-38378
464/DSCR6 (−463); chr21:38445715-38445740/PIGP (−625), TTC3 (+157); chr21:38639559-38639615/DSCR3
(+246); chr21:38640142-38640190/DSCR3 (−333); chr21:39288704-39288790/KCNJ6 (−51); chr21:40032321-40
032367/ERG (−161916), ETS2 (−145505); chr21:40105944-40105997/ERG (−235543), ETS2 (−71878); chr21:40
684774-40684842/BRWD1 (+904); chr21:42218515-42218595/DSCAM (+484); chr21:42218931-42218980/DS
CAM (+83); chr21:42539543-42539583/BACE2 (−165); chr21:42880225-42880260/TMPRSS2 (−251); chr21:431
46051-43146129/TMPRSS2 (−266098), RIPK4 (+41159); chr21:43181496-43181626/TMPRSS2 (−301569), RIP
K4 (+5688); chr21:43183619-43183721/TMPRSS2 (−303678), RIPK4 (+3579); chr21:43186434-43186592/RIPK
4 (+736); chr21:43429287-43429338/C2CD2 (−55314), ZNF295 (+1183); chr21:43916158-43916199/SLC37A1
(−3563), RSPH1 (+222); chr21:43953090-43953146/PDE9A (−120744), SLC37A1 (+33376); chr21:44104429-441
04524/PDE9A (+30615), WDR4 (+195201); chr21:44164911-44164949/PDE9A (+91068), WDR4 (+134748); chr
21:44259714-44259802/WDR4 (+39920), PDE9A (+185896); chr21:44494778-44494940/CBS (+1613), PKNOX
1 (+100216); chr21:44496970-44496987/CBS (−507); chr21:44527528-44527576/U2AF1 (+136); chr21:4478229
6-44782503/SIK1 (+64602), CRYAA (+193259); chr21:44803650-44803685/SIK1 (+43334), CRYAA (+214527);
chr21:44819111-44819309/SIK1 (+27792), CRYAA (+230069); chr21:44819972-44820075/SIK1 (+26978), CRY
AA (+230883); chr21:44846340-44846380/SIK1 (+642); chr21:45149027-45149198/PDXK (+10135), CSTB (+4
7146); chr21:45237759-45237827/AGPAT3 (−47323), RRP1 (+28375); chr21:45246277-45246324/AGPAT3 (−3
8815), RRP1 (+36883); chr21:45563266-45563294/C21orf33 (+9786), ICOSLG (+97554); chr21:45577552-455
77591/C21orf33 (+24078), ICOSLG (+83262); chr21:45577752-45577842/C21orf33 (+24303), ICOSLG (+83037);
chr21:45592692-45592949/C21orf33 (+39327), ICOSLG (+68013); chr21:45627276-45627371/ICOSLG (+33
510), C21orf33 (+73830); chr21:45770272-45770304/TRPM2 (−3196); chr21:45770666-45770688/TRPM2 (−280
7); chr21:45924177-45924274/KRTAP10-1 (+35852), LRRC3 (+48833); chr21:46048145-46048203/KRTAP10-1
0 (−9099), KRTAP10-9 (+1134); chr21:46126428-46126566/TSPEAR (+4998), KRTAP10-12 (+9410); chr21:462
92671-46292743/SUMO3 (−54663), PTTG1IP (+1111); chr21:46331566-46331662/PTTG1IP (−37796), ITGB2
(+9351); chr21:46334373-46334459/PTTG1IP (−40598), ITGB2 (+6549); chr21:46360142-46360167/C21orf67 (−3
27); chr21:46438972-46439007/C21orf67 (−79162), ADARB1 (−55503); chr21:46706975-46707016/POFUT2 (+8
15); chr21:46824246-46824277/POFUT2 (−116451), COL18A1 (−51162); chr21:46897110-46897232/COL18A1
(+21747), SLC19A1 (+65214); chr21:46902889-46902922/COL18A1 (+27482), SLC19A1 (+59479); chr21:46955
460-46955496/SLC19A1 (+6907), COL18A1 (+80054); chr21:46962289-46962342/SLC19A1 (+69); chr21:4696
2899-46962915/SLC19A1 (−522); chr21:46975642-46975668/PCBP3 (−294220), SLC19A1 (−13270); chr21:4701
0230-47010262/PCBP3 (−259629), SLC19A1 (−47861); chr21:47062156-47062175/PCBP3 (−207709), SLC19A1
(−99781); chr21:47062367-47062442/PCBP3 (−207470), SLC19A1 (−100020); chr21:47275485-47275610/COL6
A1 (−126115), PCBP3 (+5673); chr21:47392659-47392726/COL6A1 (−8970), PCBP3 (+122818); chr21:4741073
0-47410793/COL6A2 (−107271), COL6A1 (+9099); chr21:47518313-47518349/COL6A2 (+298); chr21:4751886
6-47518887/COL6A2 (+844); chr21:47705695-47705732/YBEY (−553), MCM3AP (−478); chr21:47717387-4771
7433/PCNT (−26626), YBEY (+11143); chr21:47717673-47717748/PCNT (−26325), YBEY (+11444); chr21:4771
7952-47717981/PCNT (−26069), YBEY (+11700); chr21:47878720-47878745/DIP2A (−129); chr21:47971700-47
971831/S100B (+53269), DIP2A (+92904); chr21:48055801-48055968/PRMT2 (+378); chr22:17001401-170014
09/OR11H1 (−551601), CCT8L2 (+72295); chr22:17001535-17001595/OR11H1 (−551761), CCT8L2 (+72135); c
hr22:17081936-17082068/CCT8L2 (−8302), XKR3 (+220582); chr22:17082532-17082758/CCT8L2 (−8945), XKR
3 (+219939); chr22:17082894-17082988/CCT8L2 (−9241), XKR3 (+219643); chr22:17083411-17083524/CCT8L
2 (−9768), XKR3 (+219116); chr22:17083774-17083820/CCT8L2 (−10097), XKR3 (+218787); chr22:17084068-1
7084117/CCT8L2 (−10393), XKR3 (+218491); chr22:17090664-17090840/CCT8L2 (−17052), XKR3 (+211832); c
hr22:17091010-17091036/CCT8L2 (−17323), XKR3 (+211561); chr22:17567050-17567093/IL17RA (+1221), CE
CR5 (+73097); chr22:17601134-17601259/IL17RA (+35346), CECR5 (+38972); chr22:17628264-17628291/CE
CR5 (+11891), IL17RA (+62427); chr22:17652593-17652654/CECR5 (−12455), CECR1 (+38155); chr22:178494
27-17849501/CECR1 (−158685), CECR2 (−107166); chr22:18594073-18594113/TUBA8 (+640); chr22:1863281
0-18632850/USP18 (+72); chr22:18893854-18893877/DGCR6 (+130); chr22:18923603-18923626/PRODH (+45
1); chr22:18958356-18958403/PRODH (−34314), DGCR2 (+151587); chr22:19109138-19109201/DGCR2 (+797);
chr22:19136325-19136557/DGCR14 (−4251); chr22:19136696-19136720/DGCR14 (−4518); chr22:19138322-
19138341/GSC2 (−536); chr22:19138632-19138682/GSC2 (−861); chr22:19419201-19419255/MRPL40 (−808),
HIRA (−9); chr22:19467659-19467702/UFD1L (−943), CDC45 (+267); chr22:19510947-19511141/CLDN5 (+1816),
CDC45 (+43630); chr22:19511456-19511541/CLDN5 (+1361), CDC45 (+44085); chr22:19512005-19512083/
CLDN5 (+816); chr22:19512319-19512376/CLDN5 (+512); chr22:19683303-19683379/CLDN5 (−170481), SEPT
5 (−18646); chr22:19710616-19710698/TBX1 (−33569), GP1BB (+4665); chr22:19711326-19711609/TBX1 (−327
58), GP1BB (+5476); chr22:19711740-19711891/TBX1 (−32410), GP1BB (+5824); chr22:19742758-19742788/T
BX1 (−1453); chr22:19743335-19743352/TBX1 (−882); chr22:19743967-19744034/TBX1 (−225); chr22:1974610
7-19746163/TBX1 (+1909), GNB1L (+96327); chr22:19747011-19747099/TBX1 (+2829), GNB1L (+95407); chr
22:19748909-19748960/TBX1 (+4709), GNB1L (+93527); chr22:19749069-19749084/TBX1 (+4851), GNB1L
(+93385); chr22:19753378-19753516/TBX1 (+9221), GNB1L (+89015); chr22:19753687-19753869/TBX1 (+9552),
GNB1L (+88684); chr22:19754819-19754837/TBX1 (+10602), GNB1L (+87634); chr22:19760403-19760532/T
BX1 (+16242), GNB1L (+81994); chr22:20104374-20104413/RANBP1 (−630), TRMT2A (+374); chr22:20105204-
20105250/TRMT2A (−459), RANBP1 (+203); chr22:20234524-20234617/RTN4R (+21245), ZDHHC8 (+115207);
chr22:20255181-20255234/RTN4R (+608); chr22:20255670-20255700/RTN4R (+131); chr22:20255880-20255
907/RTN4R (−78); chr22:20380069-20380138/TMEM191B (+2435), USP41 (+351438); chr22:20484233-204842
59/TMEM191B (+106577), USP41 (+247296); chr22:20779799-20779941/SCARF2 (+12276), ZNF74 (+31390);
chr22:20780407-20780437/SCARF2 (+11724), ZNF74 (+31942); chr22:20783549-20783647/SCARF2 (+8548),
ZNF74 (+35118); chr22:20784124-20784192/SCARF2 (+7988), ZNF74 (+35678); chr22:20784980-20785060/S
CARF2 (+7126), ZNF74 (+36540); chr22:20785372-20785608/SCARF2 (+6656), ZNF74 (+37010); chr22:20785
897-20786069/SCARF2 (+6163), ZNF74 (+37503); chr22:20792370-20792481/SCARF2 (−280); chr22:2086223
3-20862291/MED15 (+376); chr22:21025335-21025538/SERPIND1 (−102946), MED15 (+163551); chr22:21212
833-21212884/SNAP29 (−433), PI4KA (+241); chr22:21272199-21272239/CRKL (+505); chr22:21355987-21356
050/THAP7 (+385); chr22:21368382-21368435/P2RX6 (−1055); chr22:21386877-21386893/SLC7A4 (−38); chr2
2:21714756-21714880/GGT2 (−151046), HIC2 (−56875); chr22:21748474-21748600/GGT2 (−184765), HIC2 (−23
156); chr22:21774713-21774820/TMEM191C (−46692), HIC2 (+3074); chr22:21823888-21823967/TMEM191C
(+2469), PI4KAP2 (+22455); chr22:22090528-22090836/YPEL1 (−611); chr22:22472319-22472376/TOP3B (−135
201), VPREB1 (−126852); chr22:23413253-23413295/GNAZ (+605); chr22:23524135-23524303/BCR (+1667), I
GLL1 (+398276); chr22:23863737-23863792/IGLL1 (+58730), BCR (+341213); chr22:23864046-23864080/IGL
L1 (+58432), BCR (+341511); chr22:23864871-23864921/IGLL1 (+57599), BCR (+342344); chr22:24109695-24
109731/CHCHD10 (+428); chr22:24109915-24109955/CHCHD10 (+206); chr22:24129201-24129236/SMARCB
1 (+69); chr22:24180994-24181054/DERL3 (+175); chr22:24890963-24890979/UPB1 (+894); chr22:24951586-
24951655/SNRPD3 (+3); chr22:25081894-25081993/PIWIL3 (+88739), GGT1 (+102226); chr22:25466115-254
66179/TMEM211 (−130833), CRYBB3 (−129678); chr22:25507818-25507934/TMEM211 (−172562), CRYBB3 (−8
7949); chr22:25678869-25679042/CRYBB2 (+63344), LRP5L (+98588); chr22:25679250-25679267/CRYBB2
(+63647), LRP5L (+98285); chr22:25800852-25800898/ADRBK2 (−159986), LRP5L (−23331); chr22:25961081-25
961110/ADRBK2 (+235); chr22:25961462-25961536/ADRBK2 (+638); chr22:26565361-26565412/SEZ6L (−53);
chr22:26565651-26565734/SEZ6L (+253); chr22:26908246-26908292/TFIP11 (+168); chr22:26966160-269662
40/TFIP11 (−57763), TPST2 (+19889); chr22:27299726-27299779/CRYBA4 (+281825), MN1 (+897733); chr22:
27520524-27520593/CRYBA4 (+502631), MN1 (+676927); chr22:27719837-27719868/MN1 (+477633), CRYBA
4 (+701925); chr22:28028976-28029062/MN1 (+168467); chr22:28315336-28315374/PITPNB (−100); chr22:283
15562-28315626/PITPNB (−339); chr22:29075313-29075343/TTC28 (+525); chr22:29138266-29138322/CHEK2
(−472), HSCB (+251); chr22:29169014-29169078/XBP1 (+27514), HSCB (+31003); chr22:29469173-29469213/
KREMEN1 (+127); chr22:29469415-29469460/KREMEN1 (+372); chr22:29469633-29469664/KREMEN1 (+583);
chr22:29664509-29664534/RHBDD3 (−608), EWSR1 (+524); chr22:29709633-29709735/RASL10A (+2064),
GAS2L1 (+6687); chr22:29875975-29876004/NEFH (−191); chr22:29876295-29876396/NEFH (+165); chr22:30
117147-30117268/CABP7 (+864); chr22:30234371-30234397/ASCC2 (−91); chr22:30476148-30476196/HORM
AD2 (−281); chr22:30476321-30476413/HORMAD2 (−86); chr22:30642115-30642171/LIF (+653); chr22:306619
99-30662076/OSM (+791); chr22:30662703-30662798/OSM (+78); chr22:30667088-30667110/OSM (−4270); ch
r22:30674032-30674178/OSM (−11276), TBC1D10A (+48850); chr22:30675510-30675606/OSM (−12729), TBC
1D10A (+47397); chr22:30820372-30820431/SEC14L2 (+27472), SEC14L3 (+47632); chr22:30938507-309385
42/SEC14L4 (−36827), SEC14L6 (+4144); chr22:31063822-31063850/DUSP18 (+36); chr22:31364578-3136465
4/MORC2 (−429); chr22:31364775-31364862/MORC2 (−632); chr22:32058304-32058361/PISD (−31523), PRR1
4L (+87787); chr22:32340089-32340155/YWHAH (−357); chr22:32596799-32596917/RFPL2 (+2606), SLC5A1
(+157839); chr22:32870851-32870893/FBXO7 (+165); chr22:33271249-33271345/TIMP3 (+74495), SYN3 (+131
512); chr22:33454075-33454193/SYN3 (−51325), LARGE (+862282); chr22:35696542-35696625/TOM1 (+787);
chr22:35748604-35748696/HMOX1 (−28410), TOM1 (+52853); chr22:35768313-35768357/HMOX1 (−8725), TO
M1 (+72538); chr22:35877018-35877087/RASD2 (−60299), MCM5 (+80937); chr22:36424395-36424418/RBFO
X2 (+178); chr22:36784011-36784043/MYH9 (+36); chr22:36806000-36806060/MYH9 (−21967), TXN2 (+71657);
chr22:37212774-37212813/IFT27 (−40622), PVALB (+2723); chr22:37476126-37476160/TMPRSS6 (+23550),
KCTD17 (+28364); chr22:37637654-37637726/SSTR3 (−29337), RAC2 (+2615); chr22:37641356-37641422/R
AC2 (−1084); chr22:37730870-37730926/CYTH4 (+52403), ELFN2 (+92607); chr22:37731366-37731458/CYTH
4 (+52917), ELFN2 (+92093); chr22:37815754-37815811/ELFN2 (+7722), CYTH4 (+137288); chr22:37816463-
37816501/ELFN2 (+7023), CYTH4 (+137987); chr22:37880253-37880316/ELFN2 (−56780), MFNG (+2193); chr
22:37881146-37881430/ELFN2 (−57783), MFNG (+1190); chr22:37881686-37881787/MFNG (+741); chr22:378
82083-37882195/MFNG (+339); chr22:37957203-37957264/CDC42EP1 (+763); chr22:37962021-37962049/CD
C42EP1 (+5564), LGALS2 (+13989); chr22:37962537-37962581/CDC42EP1 (+6088), LGALS2 (+13465); chr22:
38069084-38069118/LGALS1 (−2512); chr22:38142681-38142778/H1F0 (−58384), TRIOBP (+49735); chr22:38
201231-38201269/GCAT (−2662), H1F0 (+136); chr22:38203613-38203676/GCAT (−267); chr22:38477132-384
77296/SLC16A8 (+1956), PICK1 (+23952); chr22:38478476-38478852/SLC16A8 (+506); chr22:38484991-3848
5056/SLC16A8 (−5854), BAIAP2L2 (+21652); chr22:38572663-38572759/BAIAP2L2 (−66035), PLA2G6 (+5050);
chr22:38793981-38794013/CSNK1E (−79908), KCNJ4 (+46036); chr22:38901857-38901888/DDX17 (+472); ch
r22:39102386-39102404/GTPBP1 (+588); chr22:39268356-39268385/CBX6 (−113); chr22:39540122-39540237/
CBX7 (+8358), APOBEC3H (+46951); chr22:39631410-39631517/CBX7 (−82926), PDGFB (+9493); chr22:3963
1785-39631826/CBX7 (−83268), PDGFB (+9151); chr22:39703024-39703155/PDGFB (−62133), RPL3 (+12580);
chr22:39853657-39853690/MGAT3 (−29555), TAB1 (+57915); chr22:39898153-39898201/SMCR7L (−107); chr
22:39898624-39898684/SMCR7L (+370); chr22:39953800-39953818/RPS19BP1 (−24949), CACNA1I (−12949);
chr22:39954007-39954043/RPS19BP1 (−25165), CACNA1I (−12733); chr22:39954400-39954428/RPS19BP1 (−2
5554), CACNA1I (−12344); chr22:40013624-40013703/GRAP2 (−283422), CACNA1I (+46906); chr22:40058029-
40058103/GRAP2 (−239020), CACNA1I (+91308); chr22:40058370-40058412/GRAP2 (−238695), CACNA1I (+9
1633); chr22:40060766-40060841/GRAP2 (−236282), CACNA1I (+94046); chr22:40081419-40081454/GRAP2
(−215649), CACNA1I (+114679); chr22:40081776-40081791/GRAP2 (−215302), CACNA1I (+115026); chr22:400
82129-40082159/GRAP2 (−214942), CACNA1I (+115386); chr22:40082263-40082282/GRAP2 (−214813), CAC
NA1I (+115515); chr22:41032376-41032405/MKL1 (+299); chr22:41593569-41593634/L3MBTL2 (−7711), EP30
0 (+104988); chr22:41864395-41864430/ACO2 (−716), PHF5A (+295); chr22:41864672-41864702/ACO2 (−442),
PHF5A (+21); chr22:42307040-42307095/SHISA8 (+3603), SREBF2 (+77962); chr22:42316139-42316291/SHI
SA8 (−5544), TNFRSF13C (+6606); chr22:42372574-42372621/SEPT3 (−333); chr22:42373398-42373458/SEP
T3 (+497); chr22:42466273-42466344/FAM109B (−3946), NAGA (+537); chr22:42466528-42466598/FAM109B
(−3692), NAGA (+283); chr22:42470035-42470060/NAGA (−3202), FAM109B (−207); chr22:42736919-42737016/
TCF20 (−125523), NFAM1 (+91433); chr22:42737245-42737293/TCF20 (−125824), NFAM1 (+91132); chr22:428
28275-42828385/NFAM1 (+71); chr22:42929062-42929133/SERHL2 (−20827), RRP7A (−13269); chr22:430581
82-43058216/CYB5R3 (−17559), A4GALT (+58677); chr22:43288234-43288361/ARFGAP3 (−34890), PACSIN2
(+122886); chr22:43410512-43410539/PACSIN2 (+658); chr22:43506692-43506719/BIK (−48); chr22:43524258-
43524355/MCAT (+15096), BIK (+17553); chr22:43582442-43582518/TTLL12 (+657); chr22:43582691-435827
38/TTLL12 (+422); chr22:43659516-43659545/TTLL12 (−76394), SCUBE1 (+79863); chr22:43738706-4373874
3/SCUBE1 (+669); chr22:43738900-43738928/SCUBE1 (+480); chr22:43739519-43739548/SCUBE1 (−140); ch
r22:43739781-43739825/SCUBE1 (−409); chr22:43807517-43807547/MPPED1 (−488); chr22:44258042-442580
78/SULT4A1 (+318); chr22:44319835-44319869/PNPLA3 (+233); chr22:44464852-44464991/PARVG (−112335),
PARVB (+44765); chr22:44726978-44727058/PRR5-ARHGAP8 (−371354), KIAA1644 (−18287); chr22:450544
02-45054467/KIAA1644 (−345704), PRR5-ARHGAP8 (−43937); chr22:45064237-45064286/KIAA1644 (−355531),
PRR5-ARHGAP8 (−34110); chr22:45125565-45125610/PRR5-ARHGAP8 (+27216), PHF21B (+280221); chr22:
45236685-45236697/PRR5-ARHGAP8 (+138319), PHF21B (+169118); chr22:45405011-45405046/PHF21B
(+780); chr22:45405432-45405476/PHF21B (+355); chr22:45405959-45406039/PHF21B (−190); chr22:45665089-
45665122/UPK3A (−15762), NUP50 (+105380); chr22:45899185-45899227/FBLN1 (+487); chr22:46262307-462
62367/WNT7B (+110671), ATXN10 (+194659); chr22:46263052-46263123/WNT7B (+109920), ATXN10 (+1954
10); chr22:46263297-46263511/WNT7B (+109604), ATXN10 (+195726); chr22:46263624-46263743/WNT7B
(+109324), ATXN10 (+196006); chr22:46264633-46264689/WNT7B (+108347), ATXN10 (+196983); chr22:46276
386-46276442/WNT7B (+96594), ATXN10 (+208736); chr22:46307952-46308014/WNT7B (+65025), ATXN10
(+240305); chr22:46362349-46362429/WNT7B (+10619), ATXN10 (+294711); chr22:46366288-46366507/WNT
7B (+6610), ATXN10 (+298720); chr22:46367360-46367532/WNT7B (+5562), ATXN10 (+299768); chr22:46367
987-46368102/WNT7B (+4963), ATXN10 (+300367); chr22:46368256-46368656/WNT7B (+4552), ATXN10 (+3
00778); chr22:46372761-46372769/WNT7B (+243); chr22:46441099-46441131/PPARA (−105384), WNT7B (−68
107); chr22:46449549-46449563/PPARA (−96943), WNT7B (−76548); chr22:46466564-46466611/WNT7B (−935
80), PPARA (−79911); chr22:46546560-46546609/PPARA (+86); chr22:46658904-46658938/TTC38 (−4940), PK
DREJ (+298); chr22:46684197-46684336/GTSE1 (−8371), TTC38 (+20406); chr22:46693149-46693205/GTSE1
(+539); chr22:46861455-46861485/CELSR1 (+71597), TRMU (+130172); chr22:46932504-46932533/CELSR1
(+548); chr22:47070140-47070190/GRAMD4 (+47517), CERK (+63987); chr22:47070594-47070719/GRAMD4
(+48009), CERK (+63495); chr22:47081750-47081788/CERK (+52383), GRAMD4 (+59121); chr22:47170624-47
170666/TBC1D22A (+12127); chr22:47199208-47199299/TBC1D22A (+40736); chr22:47798173-47798287/TB
C1D22A (+639712); chr22:48884897-48884959/FAM19A5 (−360); chr22:48885842-48885886/FAM19A5 (+576);
chr22:48962717-48962779/FAM19A5 (+77460); chr22:48972466-48972486/FAM19A5 (+87188); chr22:489726
04-48972617/FAM19A5 (+87323); chr22:48976420-48976468/FAM19A5 (+91156); chr22:49098636-49098700/
FAM19A5 (+213380); chr22:49856630-49856682/BRD1 (+361796), FAM19A5 (+971368); chr22:50050839-500
50857/BRD1 (+167604); chr22:50064662-50064759/BRD1 (+153741); chr22:50118697-50118722/BRD1 (+997
42); chr22:50120592-50120642/BRD1 (+97835); chr22:50201726-50201802/BRD1 (+16688); chr22:50220453-
50220504/BRD1 (−2027); chr22:50241846-50241887/BRD1 (−23415), ZBED4 (−5630); chr22:50242156-502421
90/BRD1 (−23721), ZBED4 (−5324); chr22:50243523-50243630/ZBED4 (−3920); chr22:50312481-50312502/AL
G12 (−386), CRELD2 (+209); chr22:50354085-50354104/PIM3 (−48); chr22:50422226-50422427/PIM3 (+68184),
MLC1 (+101454); chr22:50438273-50438305/PIM3 (+84146), MLC1 (+85492); chr22:50497183-50497213/ML
C1 (+26583), PIM3 (+143055); chr22:50551101-50551226/PANX2 (−57996), MOV10L1 (+22729); chr22:506233
35-50623414/PANX2 (+14215), TUBGCP6 (+60025); chr22:50623527-50623536/PANX2 (+14372), TUBGCP6
(+59868); chr22:50623715-50623741/PANX2 (+14568), TUBGCP6 (+59672); chr22:50640368-50640412/PANX
2 (+31230), TUBGCP6 (+43010); chr22:50709292-50709348/MAPK11 (−541); chr22:50731831-50731883/MAP
K11 (−23078), PLXNB2 (+14144); chr22:50732030-50732079/MAPK11 (−23276), PLXNB2 (+13946); chr22:5075
2736-50752783/PPP6R2 (−28986), PLXNB2 (−6759); chr22:50945836-50945940/NCAPH2 (−757), LMF2 (+247);
chr22:50946098-50946119/NCAPH2 (−536), LMF2 (+26); chr22:50946720-50946784/LMF2 (−617), NCAPH2
(+107); chr22:50946962-50946998/LMF2 (−845), NCAPH2 (+335); chr22:50986971-50987013/ODF3B (−15984), C
PT1B (+29902); chr22:50987302-50987509/ODF3B (−16398), CPT1B (+29488); chr22:51021410-51021437/CP
T1B (−4530), CHKB (+4); chr22:51042030-51042182/MAPK8IP2 (+544); chr22:51042405-51042457/MAPK8IP2
(+869); chr22:51042566-51042806/MAPK8IP2 (+1124), ARSA (+23915); chr22:51042935-51042973/MAPK8IP2
(+1392), ARSA (+23647); chr22:51110846-51110950/SHANK3 (−2172); chr22:51112010-51112026/SHANK3
(−1052); chr3:239126-239158/CHL1 (+863); chr3:2139976-2140037/CNTN4 (−543); chr3:2140148-2140181/CNT
N4 (−385); chr3:2141450-2141539/CNTN4 (+945); chr3:3221531-3221564/CRBN (−147); chr3:4909827-490990
6/BHLHE40 (−111230), ITPR1 (+374835); chr3:5228847-5228884/EDEM1 (−493); chr3:6902862-6902929/GRM
7 (+94); chr3:6903099-6903188/GRM7 (+342); chr3:6904488-6904532/GRM7 (+1708); chr3:8810076-8810151/
OXTR (+1186), CAV3 (+34628); chr3:9177902-9177995/RAD18 (−172790), SRGAP3 (+113362); chr3:9178130-
9178296/RAD18 (−173054), SRGAP3 (+113098); chr3:9550617-9550664/LHFPL4 (+44845), THUMPD3 (+1459
24); chr3:9595559-9595598/LHFPL4 (−93); chr3:9774197-9774246/BRPF1 (+788); chr3:9791997-9792057/OG
G1 (+399); chr3:9885473-9885516/RPUSD3 (+207); chr3:9993933-9993964/PRRT3 (+129); chr3:10028415-10
028473/TMEM111 (+78); chr3:10068005-10068058/FANCD2 (−81); chr3:10183396-10183460/VHL (+109); chr3:
10184561-10184583/IRAK2 (−21991), VHL (+1253); chr3:10857718-10857735/SLC6A11 (−190); chr3:1103535
3-11035382/SLC6A1 (+948); chr3:11079151-11079297/HRH1 (−116990), SLC6A1 (+44804); chr3:11762053-11
762076/VGLL4 (−76667), TAMM41 (+126287); chr3:12045920-12045978/SYN2 (+87); chr3:12046353-1204637
7/SYN2 (+503); chr3:12330230-12330283/TIMP4 (−129406), PPARG (−62744); chr3:12525721-12525801/TSEN
2 (−249); chr3:12705173-12705265/RAF1 (+481); chr3:12838451-12838507/CAND2 (+308); chr3:12910477-129
10504/RPL32 (−28542), IQSEC1 (+204126); chr3:13008598-13008692/RPL32 (−126696), IQSEC1 (+105972); c
hr3:13009453-13009475/RPL32 (−127515), IQSEC1 (+105153); chr3:13035667-13035681/RPL32 (−153725), IQ
SEC1 (+78943); chr3:13107888-13107921/RPL32 (−225956), IQSEC1 (+6712); chr3:13115122-13115176/IQSE
C1 (−532); chr3:13246005-13246037/IQSEC1 (−131404), NUP210 (+215788); chr3:13324029-13324073/IQSEC
1 (−209434), NUP210 (+137758); chr3:13456169-13456342/IQSEC1 (−341639), NUP210 (+5553); chr3:1359041
4-13590447/FBLN2 (−194); chr3:13590895-13590909/FBLN2 (+277); chr3:13696546-13696627/FBLN2 (+10596
2), WNT7A (+225031); chr3:14597400-14597427/C3orf20 (−119192), GRIP2 (−13826); chr3:14644713-1464474
9/C3orf20 (−71875), GRIP2 (−61143); chr3:14852205-14852212/FGD5 (−8260), C3orf20 (+135603); chr3:149898
21-14989845/NR2C2 (+597); chr3:15373663-15373720/SH3BP5 (+412); chr3:15901213-15901301/ANKRD28
(−204); chr3:16306251-16306326/OXNAD1 (−378), DPH3 (+207); chr3:16925532-16925583/DAZL (−278552), PL
CL2 (−49024); chr3:16926220-16926261/DAZL (−279235), PLCL2 (−48341); chr3:17784397-17784451/TBC1D5
(−184); chr3:19988994-19989023/RAB5A (+437); chr3:22413911-22413959/UBE2E2 (−830849), ZNF385D (−621
119); chr3:22414085-22414308/UBE2E2 (−830587), ZNF385D (−621381); chr3:23244247-23244293/UBE2E2
(−514); chr3:23848756-23848806/UBE2E1 (+1397), NKIRAS1 (+109756); chr3:24535849-24535911/THRB (+433);
chr3:24871177-24871245/RARB (−598623), THRB (−334898); chr3:27410843-27410882/NEK10 (+49); chr3:2
7764472-27764595/EOMES (−749); chr3:27765362-27765400/EOMES (−1596); chr3:27772107-27772184/CMC
1 (−510978), EOMES (−8361); chr3:32279432-32279558/CMTM8 (−676); chr3:32443051-32443152/CMTM7 (+9
939), CMTM6 (+101301); chr3:32501530-32501625/CMTM6 (+42825), CMTM7 (+68415); chr3:32543625-3254
3690/CMTM6 (+745); chr3:32822276-32822312/TRIM71 (−37216), CNOT10 (+95596); chr3:32859027-3285925
5/TRIM71 (−369); chr3:32860306-32860466/TRIM71 (+876); chr3:33156052-33156075/CRTAP (+614); chr3:334
81629-33481683/UBP1 (+241); chr3:33481864-33481890/UBP1 (+20); chr3:35680735-35680814/ARPP21 (−30
74); chr3:36422058-36422076/STAC (−30); chr3:36805537-36805575/DCLK3 (−24204), TRANK1 (+180992); chr
3:36806130-36806178/DCLK3 (−24802), TRANK1 (+180394); chr3:38035701-38035773/VILL (+659); chr3:3806
5892-38065948/PLCD1 (+358); chr3:38070670-38070745/PLCD1 (−4430); chr3:38081009-38081153/DLEC1
(+385); chr3:38081286-38081338/DLEC1 (+616); chr3:38179884-38179984/ACAA1 (−1201), MYD88 (−35); chr3:3
8206874-38206942/OXSR1 (−118); chr3:38495175-38495213/ACVR2B (−596); chr3:38691213-38691468/SCN5
A (−4074); chr3:39222468-39222493/CSRNP1 (−27379), XIRP1 (+11604); chr3:40494421-40494471/RPL14 (−43
55); chr3:40566536-40566563/ZNF621 (+174); chr3:40657189-40657325/CTNNB1 (−583685), ZNF621 (+90881);
chr3:41962687-41962817/ULK4 (+40908), CTNNB1 (+721810); chr3:42632455-42632475/NKTR (−9682), SE
C22C (−8945); chr3:42947809-42947832/ZNF662 (+163); chr3:43663169-43663221/ANO10 (+365); chr3:44040
026-44040056/C3orf23 (−339903), ABHD5 (+307666); chr3:44622682-44622730/ZNF660 (−3750); chr3:457305
63-45730623/SACM1L (−161); chr3:46506189-46506216/LTF (+395); chr3:46940054-46940076/NBEAL2 (−8110
8), PTH1R (+16326); chr3:47021024-47021079/NBEAL2 (−121); chr3:47050892-47051141/NBEAL2 (+29844),
SETD2 (+154450); chr3:47323677-47323729/KIF9 (+634); chr3:47620018-47620058/CSPG5 (+321); chr3:4782
3549-47823588/SMARCC1 (−164); chr3:47830232-47830269/DHX30 (−14148), SMARCC1 (−6846); chr3:483426
91-48342763/NME6 (+121); chr3:48520644-48520747/SHISA5 (−5755), SHISA5 (+20965); chr3:48646851-4864
6941/UQCRC1 (+202); chr3:48694155-48694226/TMEM89 (−35002), CELSR3 (+15790); chr3:48699089-48699
120/TMEM89 (−39916), CELSR3 (+10876); chr3:48723487-48723576/NCKIPSD (−198); chr3:48884753-488847
94/PRKAR2A (+496); chr3:48936247-48936303/SLC25A20 (+151); chr3:49203723-49203742/LAMB2 (−33134),
KLHDC8B (−5285); chr3:49394996-49395066/GPX1 (+760); chr3:49448641-49448690/TCTA (−973), RHOA (+8
60); chr3:49449439-49449454/TCTA (−192), RHOA (+79); chr3:49726560-49726623/RNF123 (−398), MST1 (−39
6); chr3:49727197-49727230/MST1 (−1018), RNF123 (+224); chr3:49967131-49967160/MON1A (+299); chr3:5
0203599-50203666/GNAT1 (−25410), SEMA3F (+10785); chr3:50312233-50312384/C3orf45 (−4209); chr3:5031
2997-50313020/C3orf45 (−3509); chr3:50313541-50313608/C3orf45 (−2943); chr3:50313795-50313931/C3orf45
(−2655); chr3:50314074-50314100/C3orf45 (−2431); chr3:50337069-50337166/HYAL3 (−798); chr3:50358957-5
0358980/HYAL1 (−17965), HYAL2 (+1312); chr3:50378696-50378733/RASSF1 (−348); chr3:50382960-5038301
8/RASSF1 (−4622), ZMYND10 (+167); chr3:50383244-50383263/RASSF1 (−4887), ZMYND10 (−98); chr3:51422
243-51422315/MANF (−413); chr3:51976266-51976338/RRP9 (−380), PARP3 (−59); chr3:52016827-52016853/A
CY1 (−460); chr3:52090184-52090241/DUSP7 (+248); chr3:52232402-52232453/ALAS1 (+329); chr3:52279836-
52279864/PPM1M (+41); chr3:52443863-52443906/PHF7 (−642), BAP1 (+124); chr3:52529184-52529415/STA
B1 (−56); chr3:53195173-53195238/PRKCD (−17); chr3:53915846-53915872/ACTR8 (+370); chr3:54155099-54
155169/CACNA2D3 (−1559); chr3:54155493-54155524/CACNA2D3 (−1184); chr3:54156629-54156654/CACNA
2D3 (−51); chr3:55517291-55517334/LRTM1 (−555241), WNT5A (+4018); chr3:55523927-55524031/WNT5A (−2
648); chr3:56502766-56502800/ERC2 (−392); chr3:56716417-56716515/ERC2 (−214075), ARHGEF3 (+396870);
chr3:56950302-56950373/ERC2 (−447947), ARHGEF3 (+162998); chr3:57678584-57678760/ARF4 (−95457),
SLMAP (−64502); chr3:57994158-57994203/FLNB (+54); chr3:57994507-57994542/FLNB (+398); chr3:5857263
4-58572799/FAM107A (−9226), FAM3D (+79844); chr3:61236910-61236965/FHIT (+195); chr3:61549360-6154
9442/PTPRG (+2158), FEZF2 (+809789); chr3:62304523-62304566/FEZF2 (+54645), PTPRG (+757302); chr3:
62354385-62354445/FEZF2 (+4775), PTPRG (+807172); chr3:62354793-62354899/FEZF2 (+4344), PTPRG
(+807603); chr3:62356220-62356366/FEZF2 (+2897), PTPRG (+809050); chr3:62356645-62356792/FEZF2 (+24
71), PTPRG (+809476); chr3:62357193-62357278/FEZF2 (+1954), PTPRG (+809993); chr3:62357671-623577
35/FEZF2 (+1487), PTPRG (+810460); chr3:62358117-62358336/FEZF2 (+963); chr3:62362737-62362816/FE
ZF2 (−3587); chr3:62362917-62363098/FEZF2 (−3818); chr3:62364177-62364279/FEZF2 (−5038), CADPS (+49
6836); chr3:63263997-63264062/SYNPR (+116); chr3:64253677-64253704/PRICKLE2 (−42560), ADAMTS9 (+4
19674); chr3:65342388-65342522/ADAMTS9 (−669090), MAGI1 (+682054); chr3:65535103-65535138/ADAMT
S9 (−861756), MAGI1 (+489388); chr3:65535320-65535366/ADAMTS9 (−861978), MAGI1 (+489166); chr3:6558
2645-65582716/ADAMTS9 (−909316), MAGI1 (+441828); chr3:65582962-65583074/ADAMTS9 (−909653), MAG
I1 (+441491); chr3:66848772-66848847/LRIG1 (−297965), SUCLG2 (+856228); chr3:67706430-67706499/SUC
LG2 (−1427); chr3:68056775-68056790/FAM19A1 (+16049), FAM19A4 (+924978); chr3:68664546-68664589/F
AM19A4 (+317193), FAM19A1 (+623834); chr3:68981815-68981851/FAM19A4 (−72); chr3:69591127-69591310/
MITF (−197367), FRMD4B (−155789); chr3:69591415-69591779/MITF (−196989), FRMD4B (−156167); chr3:695
91978-69592068/MITF (−196563), FRMD4B (−156593); chr3:71276002-71276112/FOXP1 (+18259); chr3:71803
784-71803826/GPR27 (+604); chr3:71804135-71804161/GPR27 (+947); chr3:72397134-72397248/PROK2 (−56
2834), RYBP (+98583); chr3:72704342-72704381/RYBP (−208588), SHQ1 (+193236); chr3:73673708-7367381
2/PDZRN3 (+312); chr3:74664021-74664045/CNTN3 (−93690); chr3:75451895-75451969/CNTN3 (−881589), F
RG2C (−261549); chr3:75485084-75485152/CNTN3 (−914775), FRG2C (−228363); chr3:75667874-75667944/F
RG2C (−45572); chr3:75719716-75719779/FRG2C (+6267), ZNF717 (+114507); chr3:75955811-75955872/ZNF
717 (−121587); chr3:75955997-75956026/ZNF717 (−121757); chr3:85008726-85008802/CADM2 (+631); chr3:85
010802-85010876/CADM2 (+2706); chr3:87138256-87138509/CHMP2B (−138030), VGLL3 (−98126); chr3:8810
7828-88107877/CGGBP1 (+293); chr3:88198750-88198771/C3orf38 (−132); chr3:97483768-97483833/ARL6
(+206); chr3:97541367-97541433/AK296966 (+516); chr3:99535942-99536014/C3orf26 (−700); chr3:100119377-1
00119448/TOMM70A (+829); chr3:101498453-101498468/FAM55C (+432); chr3:105072767-105072783/ALCA
M (−12782); chr3:105088031-105088087/ALCAM (+2502), CBLB (+499828); chr3:105586963-105587027/CBLB
(+892); chr3:107150969-107151035/BBX (−90781); chr3:109055574-109055591/DPPA4 (+836); chr3:1090559
34-109056037/DPPA4 (+433); chr3:111579531-111579579/PHLDB2 (+987); chr3:112052141-112052251/CD20
0 (+280); chr3:112930437-112930455/BOC (−929); chr3:112930614-112930655/BOC (−740); chr3:115510869-1
15510949/GAP43 (+168758), LSAMP (+653476); chr3:117716124-117716213/NONE; chr3:119041954-119041
987/ARHGAP31 (+28751), TMEM39A (+140500); chr3:119396003-119396052/COX17 (+215); chr3:120004036-
120004079/GPR156 (−40733), FSTL1 (+165860); chr3:120025699-1 20025740/GPR156 (−62395), FSTL1 (+144
198); chr3:120169977-120170066/FSTL1 (−104); chr3:120170241-120170266/FSTL1 (−336); chr3:120461634-1
20461714/RABL3 (−290), GTF2E1 (+116); chr3:121553253-121553299/EAF2 (−758), IQCB1 (+650); chr3:12155
3765-121553827/EAF2 (−238), IQCB1 (+130); chr3:121902950-121902990/CASR (+440); chr3:121903219-121
903323/CASR (+741); chr3:122103018-122103066/CCDC58 (−968), FAM162A (+19); chr3:122296781-1222968
23/PARP15 (+353); chr3:122640753-122640946/SEMA5B (+105726), DIRC2 (+126949); chr3:122641209-1226
41233/SEMA5B (+105355), DIRC2 (+127320); chr3:122745882-122745939/SEMA5B (+665); chr3:122920878-1
22920922/SEC22A (+126); chr3:123167006-123167028/ADCY5 (+375); chr3:123168568-123168581/ADCY5
(−1183); chr3:123603185-123603206/MYLK (−47); chr3:124860569-124860811/HEG1 (−85888), SLC12A8 (+7091
9); chr3:124931263-124931305/SLC12A8 (+325); chr3:125076101-125076148/SLC12A8 (−144516), ZNF148
(+18073); chr3:125076284-125076346/SLC12A8 (−144706), ZNF148 (+17883); chr3:125094160-125094185/ZNF
148 (+25); chr3:125676967-125677121/ALG1L (−21157), ROPN1B (−10984); chr3:125690940-125691029/ROP
N1B (+2957), SLC41A3 (+112149); chr3:125802806-125802854/SLC41A3 (+304); chr3:126108190-126108251/
KLF15 (−31985), ZXDC (+86541); chr3:126113657-126113794/KLF15 (−37490), ZXDC (+81036); chr3:1267016
27-126701698/TXNRD3 (−327696), PLXNA1 (−5774); chr3:126854505-126854536/PLXNA1 (+147084), TPRA1
(+455047); chr3:127143768-127143929/TPRA1 (+165719), PLXNA1 (+436412); chr3:127392263-127392321/A
BTB1 (+511); chr3:127480529-127480590/MGLL (+61491), ABTB1 (+88779); chr3:127633950-127634094/SEC
61A1 (−137190), MGLL (−91971); chr3:127795163-127795229/SEC61A1 (+23984), RUVBL1 (+47475); chr3:127
795754-127796073/SEC61A1 (+24702), RUVBL1 (+46757); chr3:128202293-128202349/DNAJB8 (−16230), GA
TA2 (+9709); chr3:128209346-128209487/DNAJB8 (−23326), GATA2 (+2613); chr3:128210668-128210712/DN
AJB8 (−24599), GATA2 (+1340); chr3:128210983-128211669/GATA2 (+704); chr3:128212054-128212272/GAT
A2 (−133); chr3:128216646-128216698/GATA2 (−4642); chr3:128274069-128274230/GATA2 (−62120), RPN1
(+95569); chr3:128274655-128274701/GATA2 (−62648), RPN1 (+95041); chr3:128307103-128307158/GATA2 (−9
5101), RPN1 (+62588); chr3:128399491-128399546/RAB7A (−45460), RPN1 (−29800); chr3:128445228-128445
322/RAB7A (+296); chr3:128564814-128564891/ACAD9 (−33480), RAB7A (+119874); chr3:128598634-128598
701/ACAD9 (+335); chr3:128720143-128720163/GP9 (−59492), ACAD9 (+121820); chr3:128720347-12872041
8/GP9 (−59262), ACAD9 (+122050); chr3:128720534-128720566/GP9 (−59095), ACAD9 (+122217); chr3:12872
2697-128722739/GP9 (−56927), ACAD9 (+124385); chr3:128746028-128746092/GP9 (−33585), ACAD9 (+1477
27); chr3:128764717-128764778/GP9 (−14897), ACAD9 (+166415); chr3:128765030-128765049/GP9 (−14605),
ACAD9 (+166707); chr3:128765157-128765230/GP9 (−14451), ACAD9 (+166861); chr3:128840286-128840346/
RAB43 (+331); chr3:128902246-128902299/CNBP (+537); chr3:129034100-129034145/H1FX (+997); chr3:129
297146-129297230/PLXND1 (+28394), H1FOO (+35131); chr3:129312876-129312984/PLXND1 (+12652), H1F
OO (+50873); chr3:129345804-1 29345876/PLXND1 (−20258), TMCC1 (+253562); chr3:129693200-129693304/
TRH (+138); chr3:129693573-129693612/TRH (+479); chr3:129693841-129693950/TRH (+782); chr3:1296943
47-129694766/ALG1L2 (−106117), TRH (+1443); chr3:129829971-129829979/COL6A5 (−234384), ALG1L2 (+2
9301); chr3:129830161-129830212/COL6A5 (−234172), ALG1L2 (+29513); chr3:130064610-130064780/COL6A
5 (+336); chr3:130236064-130236173/COL6A6 (−43059), COL6A5 (+171760); chr3:130745247-130745318/NE
K11 (−411), ASTE1 (+363); chr3:131245950-131246019/ACPP (−790226), MRPL3 (−24125); chr3:132757480-13
2757536/TMEM108 (+337); chr3:133393277-133393462/TF (−71430), TOPBP1 (−12633); chr3:133393594-1333
93621/TF (−71192), TOPBP1 (−12871); chr3:133465292-133465369/TF (+531); chr3:133613913-133613942/RA
B6B (+763); chr3:133748366-133748401/SLCO2A1 (+536); chr3:134093552-134093626/AMOTL2 (−183); chr3:
134369519-134369552/KY (+328); chr3:134370128-134370181/KY (−291); chr3:136470826-136470865/STAG1
(+399); chr3:137481873-137481935/SOX14 (−1230); chr3:137483438-137483513/SOX14 (+342); chr3:137484
026-137484084/SOX14 (+921); chr3:137487788-137487850/CLDN18 (−229839), SOX14 (+4685); chr3:137488
004-137488090/CLDN18 (−229611), SOX14 (+4913); chr3:137489699-137489875/CLDN18 (−227871), SOX14
(+6653); chr3:137833848-137833932/DZIP1L (+561); chr3:138067979-138068012/MRAS (+488); chr3:1381542
77-138154497/ESYT3 (+972); chr3:138657495-138657617/PIK3CB (−179371), FOXL2 (+8426); chr3:13865834
4-138658414/PIK3CB (−180194), FOXL2 (+7603); chr3:138658579-138658703/PIK3CB (−180456), FOXL2 (+73
41); chr3:138658864-138659080/PIK3CB (−180787), FOXL2 (+7010); chr3:138662180-138662281/PIK3CB (−18
4046), FOXL2 (+3751); chr3:138663261-138663390/PIK3CB (−185141), FOXL2 (+2656); chr3:138663728-1386
64072/PIK3CB (−185715), FOXL2 (+2082); chr3:138664416-138664457/PIK3CB (−186252), FOXL2 (+1545); chr
3:138664769-138664802/PIK3CB (−186601), FOXL2 (+1196); chr3:138665336-138665396/FOXL2 (+616); chr3:
138665528-138665539/FOXL2 (+448); chr3:138668685-138668757/FOXL2 (−2739); chr3:138669109-13866914
0/FOXL2 (−3143); chr3:139258077-139258159/RBP1 (+553); chr3:140770302-140770407/SPSB4 (−388); chr3:1
40770590-140770643/SPSB4 (−126); chr3:140951182-140951233/ACPL2 (+526); chr3:141030471-141030521/
ZBTB38 (−12559), ACPL2 (+79814); chr3:141867786-141867861/TFDP2 (+562); chr3:141868521-141868591/T
FDP2 (−170); chr3:141944252-141944291/GK5 (+177); chr3:142681995-142682049/PAQR9 (+156); chr3:14283
8319-142838479/CHST2 (−219); chr3:142838647-142838876/CHST2 (+144); chr3:142839073-142839204/CHS
T2 (+521); chr3:142839526-142839562/CHST2 (+926); chr3:142839689-142839783/CHST2 (+1118), SLC9A9
(+727637); chr3:142839902-142839944/CHST2 (+1305), SLC9A9 (+727450); chr3:142840128-142840221/CHS
T2 (+1557), SLC9A9 (+727198); chr3:143048656-143048692/CHST2 (+210056), SLC9A9 (+518699); chr3:143
566706-143566766/SLC9A9 (+637); chr3:147106175-147106207/PLSCR1 (−843563), ZIC4 (+15880); chr3:147
108531-147108586/PLSCR1 (−845931), ZIC4 (+13512); chr3:147109766-147110010/PLSCR1 (−847260), ZIC4
(+12183); chr3:147110115-147110228/PLSCR1 (−847544), ZIC4 (+11899); chr3:147111378-147111398/PLSCR
1 (−848760), ZIC4 (+10683); chr3:147111560-147111693/PLSCR1 (−848999), ZIC4 (+10444); chr3:147113725-
147113789/PLSCR1 (−851129), ZIC4 (+8314); chr3:147114105-147114135/PLSCR1 (−851492), ZIC4 (+7951); c
hr3:147114322-147114368/PLSCR1 (−851717), ZIC4 (+7726); chr3:147115069-147115106/PLSCR1 (−852460),
ZIC4 (+6983); chr3:147122686-147122718/ZIC1 (−4479), ZIC4 (−631); chr3:147125113-147125260/ZIC4 (−3116),
ZIC1 (−1994); chr3:147127565-147127675/ZIC1 (+439); chr3:147127913-147128243/ZIC1 (+897); chr3:14712
8422-147128669/ZIC1 (+1365); chr3:147129732-147129799/ZIC1 (+2585); chr3:147131177-147131220/ZIC1
(+4018); chr3:147137001-147137075/ZIC1 (+9857); chr3:147137371-147137428/ZIC1 (+10219); chr3:14713899
9-147139250/ZIC1 (+11944); chr3:147141261-147141322/ZIC1 (+14111); chr3:147142152-147142382/ZIC1
(+15086); chr3:148415840-148415861/AGTR1 (+193); chr3:150481320-150481343/SIAH2 (−69); chr3:150803000-
150803025/MED12L (−1572); chr3:150804896-150804936/MED12L (+331); chr3:152879802-152879855/RAP2
B (−200); chr3:153839953-153840317/ARHGEF26 (+1343), DHX36 (+202151); chr3:154145565-154145627/DH
X36 (−103310), GPR149 (+1908); chr3:154146395-154146488/DHX36 (−104156), GPR149 (+1062); chr3:15479
7778-154797835/MME (−146); chr3:155588123-155588154/GMPS (−186); chr3:156009300-156009318/KCNAB
1 (+170972), SSR3 (+263664); chr3:156272710-156272763/SSR3 (+236); chr3:156392240-156392266/TIPARP
(−2200); chr3:156534098-156534392/TIPARP (+139792), CCNL1 (+344237); chr3:156892934-156893032/PTX
3 (−261597), CCNL1 (−14501); chr3:157812258-157812436/VEPH1 (−591211), SHOX2 (+11605); chr3:1578136
05-157813669/VEPH1 (−592501), SHOX2 (+10315); chr3:157820869-157821368/VEPH1 (−599983), SHOX2
(+2833); chr3:157822880-157823011/RSRC1 (−4946), SHOX2 (+1006); chr3:157823120-157823138/RSRC1 (−47
63), SHOX2 (+823); chr3:157824147-157824211/RSRC1 (−3713), SHOX2 (−227); chr3:157824909-157825059/
RSRC1 (−2908), SHOX2 (−1032); chr3:158288819-158288886/MLF1 (−100); chr3:158449909-158449969/RARR
ES1 (+336); chr3:160116675-160116718/SMC4 (−733), IFT80 (+623); chr3:160116985-160117031/SMC4 (−422),
IFT80 (+312); chr3:160167989-160168070/TRIM59 (−404); chr3:160283107-160283131/KPNA4 (+257); chr3:1
67813746-167813780/GOLIM4 (−346); chr3:169382162-169382201/MECOM (−619); chr3:169383988-16938403
3/MECOM (−2448); chr3:169899327-169899548/PHC3 (+99); chr3:170075865-170075923/SKIL (−1517); chr3:1
70137345-170137884/CLDN11 (+962); chr3:170303143-170303379/SLC7A14 (+602); chr3:170303495-170303
554/SLC7A14 (+338); chr3:171175873-171175956/SLC2A2 (−431147), TNIK (+2282); chr3:171528549-171528
609/PLD1 (−75); chr3:172165785-172165866/GHSR (+420); chr3:172166513-172166672/GHSR (−347); chr3:17
2166894-172166999/GHSR (−701); chr3:172167474-172167595/GHSR (−1289); chr3:173302669-173302734/N
LGN1 (+186458); chr3:175655182-175655239/NONE; chr3:178865811-178865876/PIK3CA (−467); chr3:17897
9132-178979157/KCNMB3 (+5693), PIK3CA (+112834); chr3:179065937-179065973/MFN1 (+475); chr3:17932
2564-179322607/MRPL47 (−152), NDUFB5 (+11); chr3:179754193-179754238/PEX5L (+301); chr3:179754760-
179754803/PEX5L (−265); chr3:179754989-179755072/PEX5L (−514); chr3:180320055-180320087/TTC14 (+15
3); chr3:181413069-181413278/DNAJC19 (−705612), SOX2 (−16538); chr3:181430367-181430443/SOX2 (+693);
chr3:181444525-181444612/SOX2 (+14857); chr3:181444949-181444988/SOX2 (+15257); chr3:181445725-
181445799/SOX2 (+16050); chr3:182698560-182698584/DCUN1D1 (−246); chr3:182897108-182897157/B3GN
T5 (−73899), LAMP3 (−16466); chr3:183735352-183735380/ABCC5 (+361); chr3:183735543-183735597/ABCC
5 (+157); chr3:184017109-184017124/PSMD2 (+95); chr3:184054379-184054446/FAM131A (−863); chr3:18409
9205-184099331/THPO (−3336), CHRD (+1407); chr3:184286546-184286582/VPS8 (−243367), EPHB3 (+6977);
chr3:184301801-184301859/VPS8 (−228101), EPHB3 (+22243); chr3:184319400-184319469/VPS8 (−210496),
EPHB3 (+39848); chr3:184319843-184319873/VPS8 (−210073), EPHB3 (+40271); chr3:184321874-184322209/
VPS8 (−207889), EPHB3 (+42455); chr3:184405562-184405614/VPS8 (−124343), EPHB3 (+126001); chr3:1844
96482-184496611/VPS8 (−33384), EPHB3 (+216960); chr3:185654572-185654633/IGF2BP2 (−111776), TRA2B
(+1321); chr3:185654988-185655065/TRA2B (+897); chr3:185911588-185911606/ETV5 (−84696), DGKG (+16
8426); chr3:185911722-185911771/ETV5 (−84846), DGKG (+168276); chr3:186079771-186079818/DGKG (+22
8); chr3:186285068-186285079/DNAJB11 (−2878), TBCCD1 (+67); chr3:186490652-186490719/EIF4A2 (−1067
5), KNG1 (+55588); chr3:186542782-186542843/RFC4 (−18523), ADIPOQ (−17650); chr3:186543137-18654324
3/RFC4 (−18900), ADIPOQ (−17273); chr3:186543526-186543567/RFC4 (−19257), ADIPOQ (−16916); chr3:1873
87921-187388006/SST (+237); chr3:187676563-187676643/LPP (−254118), BCL6 (−213090); chr3:192125829-
192126115/FGF12 (+866); chr3:192126711-192126786/FGF12 (+89); chr3:192127373-192127556/FGF12 (−62
7); chr3:192127731-192127936/FGF12 (−996); chr3:192232819-192232849/HRASLS (−726084), FGF12 (−1059
96); chr3:192232952-192233003/HRASLS (−725940), FGF12 (−106140); chr3:192445387-192445421/HRASLS
(−513514), FGF12 (−318566); chr3:193587593-193587652/HES1 (−266308), OPA1 (+276690); chr3:193858882-
193858949/HES1 (+4985), CPN2 (+213141); chr3:193924363-193924403/HES1 (+70452), CPN2 (+147674); c
hr3:193987655-193987699/CPN2 (+84380), HES1 (+133746); chr3:194117484-194117769/LRRC15 (−27155),
GP5 (+2368); chr3:194118180-194118267/LRRC15 (−27752), GP5 (+1771); chr3:194118746-194118917/LRRC
15 (−28360), GP5 (+1163); chr3:194207367-194207382/ATP13A3 (−18407), TMEM44 (+146775); chr3:1942082
58-194208467/ATP13A3 (−19395), TMEM44 (+145787); chr3:194208855-194208926/ATP13A3 (−19923), TME
M44 (+145259); chr3:194406553-194406589/LSG1 (−13365), XXYLT1 (+585324); chr3:194407989-194407996/
LSG1 (−14787), XXYLT1 (+583902); chr3:194408769-194408838/LSG1 (−15598), XXYLT1 (+583091); chr3:194
705949-194706050/LSG1 (−312794), XXYLT1 (+285895); chr3:195270087-195270134/PPP1R2 (+113); chr3:19
5488911-195489066/MUC20 (+41236), MUC4 (+49855); chr3:195583592-195583665/MUC4 (−44785), TNK2
(+38803); chr3:195621979-195622064/TNK2 (+410); chr3:195634142-195634194/TNK2 (−11736), SDHAP1 (+829
82); chr3:195635757-195635785/TNK2 (−13339), SDHAP1 (+81379); chr3:195636295-195636337/TNK2 (−1388
4), SDHAP1 (+80834); chr3:195753067-195753108/SDHAP1 (−35938), TFRC (+55944); chr3:195808391-19580
8435/TFRC (+619); chr3:195886887-195887032/TFRC (−77928), ZDHHC19 (+51340); chr3:195947391-195947
506/OSTalpha (+4066), PCYT1A (+67135); chr3:196014427-196014503/PCYT1A (+119); chr3:196159284-196
159339/UBXN7 (+33); chr3:196255745-196255875/FBXO45 (−39915), C3orf43 (−13573); chr3:196359639-1963
59787/LRRC33 (−6943), FBXO45 (+63988); chr3:196367506-196367631/LRRC33 (+913); chr3:196730268-196
730371/PIGZ (−34616), MFI2 (+26367); chr3:197281858-197281920/BDH1 (+969); chr3:197282619-197282805/
BDH1 (+146); chr3:197463790-197463818/KIAA0226 (−31); chr3:197808349-197808380/LMLN (+121294); chr
3:197840548-197840692/LMLN (+153549); chr4:107281-107296/ZNF718 (−17113), ZNF718 (+54062); chr4:107
509-107875/ZNF718 (−16710), ZNF718 (+54465); chr4:206593-206607/ZNF718 (+82198), ZNF732 (+83344); c
hr4:206742-206813/ZNF718 (+82376), ZNF732 (+83166); chr4:298782-298821/ZNF141 (−32794), ZNF732 (−88
58); chr4:299021-299032/ZNF141 (−32569), ZNF732 (−9083); chr4:568653-568906/ZNF721 (−75338), PDE6B
(−50583); chr4:569116-569274/ZNF721 (−75753), PDE6B (−50168); chr4:569436-569460/ZNF721 (−76006), PDE6
B (−49915); chr4:569733-569933/ZNF721 (−76391), PDE6B (−49530); chr4:570257-570298/ZNF721 (−76836), P
DE6B (−49085); chr4:668655-668707/MYL5 (−3030), ATP5I (−554); chr4:682570-683014/MFSD7 (+181); chr4:77
9086-779189/CPLX1 (+40807), PCGF3 (+79565); chr4:779398-779461/CPLX1 (+40515), PCGF3 (+79857); chr
4:780406-780551/CPLX1 (+39466), PCGF3 (+80906); chr4:789693-789734/CPLX1 (+30231), PCGF3 (+90141);
chr4:820653-820702/CPLX1 (−733); chr4:967385-967415/DGKQ (−56); chr4:967621-967632/DGKQ (−283); chr
4:995539-995875/FGFRL1 (−10053), SLC26A1 (−8483); chr4:995994-996100/FGFRL1 (−9713), SLC26A1 (−882
3); chr4:996298-996495/FGFRL1 (−9363), SLC26A1 (−9173); chr4:996797-996882/SLC26A1 (−9616), FGFRL1
(−8920); chr4:1006166-1006198/FGFRL1 (+422); chr4:1049790-1049908/FGFRL1 (+44089), RNF212 (+57503);
chr4:1107280-1107324/RNF212 (+50); chr4:1164854-1164984/RNF212 (−57567), SPON2 (+1738); chr4:11652
87-1165449/RNF212 (−58016), SPON2 (+1289); chr4:1195837-1196010/SPON2 (−29267), CTBP1 (+46984); ch
r4:1210625-1210918/SPON2 (−44115), CTBP1 (+32136); chr4:1243309-1243334/CTBP1 (−414); chr4:1288919-
1288994/CRIPAK (−96383), MAEA (+5285); chr4:1303356-1303427/CRIPAK (−81948), MAEA (+19720); chr4:13
40250-1340280/CRIPAK (−45075), MAEA (+56593); chr4:1340688-1340718/CRIPAK (−44637), MAEA (+57031);
chr4:1395728-1395811/CRIPAK (+10430), FAM53A (+290218); chr4:1396697-1396779/CRIPAK (+11398), FA
M53A (+289250); chr4:1397026-1397259/CRIPAK (+11803), FAM53A (+288845); chr4:1398247-1398263/CRIP
AK (+12915), FAM53A (+287733); chr4:1398840-1398858/CRIPAK (+13509), FAM53A (+287139); chr4:139963
3-1399665/CRIPAK (+14309), FAM53A (+286339); chr4:1400511-1400671/CRIPAK (+15251), FAM53A (+2853
97); chr4:1400868-1400997/CRIPAK (+15593), FAM53A (+285055); chr4:1401522-1401642/CRIPAK (+16242),
FAM53A (+284406); chr4:1404066-1404120/CRIPAK (+18753), FAM53A (+281895); chr4:1408743-1408885/C
RIPAK (+23474), FAM53A (+277174); chr4:1408996-1409010/CRIPAK (+23663), FAM53A (+276985); chr4:151
4632-1514674/CRIPAK (+129313), FAM53A (+171335); chr4:1724485-1724592/TMEM129 (−1455), TACC3 (+1
322); chr4:1773167-1773254/FGFR3 (−21828), TACC3 (+49994); chr4:1773774-1773831/FGFR3 (−21236), TAC
C3 (+50586); chr4:1794382-1794459/FGFR3 (−618); chr4:1794956-1794972/FGFR3 (−75); chr4:1858688-18587
26/LETM1 (−733); chr4:1864233-1864268/WHSC1 (−8872), LETM1 (−6277); chr4:2042123-2042168/C4orf48 (−1
574); chr4:2042270-2042465/C4orf48 (−1352); chr4:2060155-2060173/NAT8L (−1075); chr4:2292778-2292805/
MXD4 (−29053), ZFYVE28 (+127578); chr4:2420996-2421068/ZFYVE28 (−662); chr4:2538114-2538151/RNF4
(+67338), TNIP2 (+219970); chr4:2765667-2765764/SH3BP2 (−54196), TNIP2 (−7613); chr4:2799751-2799817/T
NIP2 (−41681), SH3BP2 (−20128); chr4:2800771-2800828/TNIP2 (−42697), SH3BP2 (−19112); chr4:3294960-32
95041/RGS12 (−20873), HTT (+218593); chr4:3387376-3387498/HGFAC (−56289), RGS12 (+71563); chr4:3491
424-3491502/DOK7 (+26430), LRPAP1 (+42761); chr4:3533386-3533472/LRPAP1 (+795); chr4:3534128-3534
148/LRPAP1 (+86); chr4:3534547-3534604/LRPAP1 (−352); chr4:3768950-3768994/ADRA2C (+676); chr4:376
9224-3769559/ADRA2C (+1096), OTOP1 (+459229); chr4:3769665-3769695/ADRA2C (+1384), OTOP1 (+4589
41); chr4:3873965-3873974/ADRA2C (+105674), OTOP1 (+354651); chr4:3957127-3957154/ADRA2C (+18884
5), OTOP1 (+271480); chr4:4144584-4144633/OTOP1 (+84012), ADRA2C (+376313); chr4:4144850-4144882/
OTOP1 (+83755), ADRA2C (+376570); chr4:4145331-4145386/OTOP1 (+83262), ADRA2C (+377063); chr4:42
28168-4228188/OTOP1 (+443); chr4:4329357-4329454/D4S234E (−58178), ZBTB49 (+37482); chr4:4389172-4
389207/D4S234E (+1606), STX18 (+154585); chr4:4397982-4398058/D4S234E (+10436), STX18 (+145755); c
hr4:4765263-4765316/STX18 (−221515), MSX1 (−96102); chr4:4855192-4855230/STX18 (−311436), MSX1 (−61
81); chr4:4856557-4856593/MSX1 (−4817); chr4:4857362-4857407/MSX1 (−4007); chr4:4857560-4857620/MSX
1 (−3802); chr4:4858107-4858130/MSX1 (−3273); chr4:4859771-4859810/MSX1 (−1601); chr4:4863318-486339
3/MSX1 (+1964), CYTL1 (+157841); chr4:4866364-4866544/MSX1 (+5062), CYTL1 (+154743); chr4:4866799-4
866929/MSX1 (+5472), CYTL1 (+154333); chr4:4867453-4867482/MSX1 (+6076), CYTL1 (+153729); chr4:486
8384-4868464/MSX1 (+7032), CYTL1 (+152773); chr4:4868793-4868828/MSX1 (+7419), CYTL1 (+152386); ch
r4:4869000-4869131/MSX1 (+7674), CYTL1 (+152131); chr4:4869258-4869481/MSX1 (+7978), CYTL1 (+1518
27); chr4:4872032-4872059/MSX1 (+10654), CYTL1 (+149151); chr4:5710228-5710280/EVC (−2670), EVC2
(+40); chr4:5713232-5713326/EVC2 (−2985), EVC (+355); chr4:5868033-5868176/CRMP1 (+26680), EVC (+1551
81); chr4:5892082-5892109/CRMP1 (+2689), EVC (+179172); chr4:5892251-5892316/CRMP1 (+2501), EVC
(+179360); chr4:5894083-5894130/CRMP1 (+678); chr4:5894277-5894599/CRMP1 (+347); chr4:6201293-62013
49/JAKMIP1 (+997); chr4:6223904-6223950/WFS1 (−47650), JAKMIP1 (−21609); chr4:6381669-6381831/WFS1
(+110173), PPP2R2C (+175655); chr4:6392268-6392279/WFS1 (+120697), PPP2R2C (+165131); chr4:64804
91-6480532/PPP2R2C (+76893), WFS1 (+208935); chr4:6642677-6642696/MRFAP1 (+242); chr4:6665813-66
66008/S100P (−29655), MRFAP1 (+23466); chr4:6666118-6666219/S100P (−29397), MRFAP1 (+23724); chr4:6
783872-6783911/KIAA0232 (−567); chr4:6784167-6784224/KIAA0232 (−263); chr4:7033760-7033861/TADA2B
(−11345), TBC1D14 (+122316); chr4:7072880-7072953/GRPEL1 (−3117); chr4:7195266-7195308/SORCS2 (+91
3); chr4:7444569-7444627/PSAPL1 (−7898), AFAP1 (+497055); chr4:7941092-7941129/AFAP1 (+542); chr4:79
70346-7970431/AFAP1 (−28736), ABLIM2 (+190170); chr4:8073656-8073691/AFAP1 (−132021), ABLIM2 (+868
85); chr4:8116361-8116503/AFAP1 (−174779), ABLIM2 (+44127); chr4:8159491-8159548/AFAP1 (−217867), AB
LIM2 (+1039); chr4:8160355-8160429/ABLIM2 (+167); chr4:8200133-8200210/SH3TC1 (−888); chr4:8201488-8
201550/SH3TC1 (+459); chr4:8281163-8281203/HTRA3 (+9694), ACOX3 (+161269); chr4:8582324-8582394/G
PR78 (+142); chr4:8582619-8582656/GPR78 (+421); chr4:8651788-8651874/CPZ (+57444), HMX1 (+221712);
chr4:8859048-8859381/HMX1 (+14328), CPZ (+264828); chr4:8860146-8860180/HMX1 (+13380), CPZ (+2657
76); chr4:8861546-8861605/HMX1 (+11967), CPZ (+267189); chr4:8861753-8861918/HMX1 (+11707), CPZ (+2
67449); chr4:8863238-8863323/HMX1 (+10262), CPZ (+268894); chr4:8863536-8863568/HMX1 (+9991), CPZ
(+269165); chr4:8864683-8864763/HMX1 (+8820), CPZ (+270336); chr4:8866160-8866264/HMX1 (+7331), CPZ
(+271825); chr4:8868846-8868931/HMX1 (+4654), CPZ (+274502); chr4:8869271-8869368/HMX1 (+4223), CP
Z (+274933); chr4:8873114-8873140/HMX1 (+416); chr4:8874538-8874580/HMX1 (−1016); chr4:8874696-8874
772/HMX1 (−1191); chr4:8876036-8876229/HMX1 (−2590); chr4:8879594-8879647/LOC650293 (−71856), HMX1
(−6078); chr4:8893344-8893391/LOC650293 (−58109), HMX1 (−19825); chr4:8893726-8893815/LOC650293 (−5
7706), HMX1 (−20228); chr4:8895084-8895128/LOC650293 (−56371), HMX1 (−21563); chr4:8896098-8896117/L
OC650293 (−55369), HMX1 (−22565); chr4:8965298-8965357/USP17 (−251803), LOC650293 (+13851); chr4:90
02285-9002329/USP17 (−214824), LOC650293 (+50830); chr4:9002823-9003020/USP17 (−214209), LOC65029
3 (+51445); chr4:9003141-9003231/USP17 (−213945), LOC650293 (+51709); chr4:9154060-9154103/USP17
(−63049), LOC650293 (+202605); chr4:9382952-9382978/DEFB131 (−63295), LOC728405 (+13365); chr4:95345
95-9534650/DRD5 (−248635), DEFB131 (+88363); chr4:9783096-9783125/DRD5 (−147); chr4:9783424-978350
0/DRD5 (+204); chr4:9783620-9783681/DRD5 (+393); chr4:10463048-10463072/ZNF518B (−4028); chr4:10589
431-10589535/ZNF518B (−130451), CLNK (+96903); chr4:11370513-11370562/CLNK (−684152), HS3ST1 (+59
999); chr4:13524252-13524529/RAB28 (−38402), NKX3-2 (+21723); chr4:13524972-13525121/RAB28 (−39058),
NKX3-2 (+21067); chr4:13525428-13525473/RAB28 (−39462), NKX3-2 (+20663); chr4:13525604-13525825/RA
B28 (−39726), NKX3-2 (+20399); chr4:13525942-13526005/RAB28 (−39985), NKX3-2 (+20140); chr4:13526628-
13526768/RAB28 (−40709), NKX3-2 (+19416); chr4:13532587-13532654/RAB28 (−46632), NKX3-2 (+13493); c
hr4:13540903-13540945/RAB28 (−54935), NKX3-2 (+5190); chr4:13541348-13541749/RAB28 (−55560), NKX3-
2 (+4565); chr4:13543581-13543972/RAB28 (−57788), NKX3-2 (+2337); chr4:13544080-13544211/RAB28 (−581
57), NKX3-2 (+1968); chr4:13545386-13545593/NKX3-2 (+624); chr4:13548590-13548634/NKX3-2 (−2498); chr
4:13628913-13628956/BOD1L (+393); chr4:14864562-14864612/CPEB2 (−139711); chr4:15004994-15005113/
CPEB2 (+756); chr4:16084819-16085166/PROM1 (−7252), TAPT1 (+143168); chr4:16085302-16085351/PROM
1 (−7586), TAPT1 (+142834); chr4:16085602-16085674/PROM1 (−7897), TAPT1 (+142523); chr4:16228936-162
28990/TAPT1 (−802), BC010030 (+677); chr4:16229130-16229202/TAPT1 (−1005), BC010030 (+880); chr4:175
13309-17513378/CLRN2 (−3444), QDPR (+513); chr4:17578667-17578690/LAP3 (−248); chr4:17578863-17578
894/LAP3 (−48); chr4:17783481-17783609/DCAF16 (+28836), MED28 (+167272); chr4:18023666-18023721/LC
ORL (−211); chr4:20254774-20255026/SLIT2 (−335); chr4:20255414-20255511/SLIT2 (+228); chr4:20256286-2
0256382/PACRGL (−445702), SLIT2 (+1099); chr4:20256662-20256676/PACRGL (−445367), SLIT2 (+1434); ch
r4:21305873-21305986/KCNIP4 (+393388), PACRGL (+603894); chr4:21950566-21950721/KCNIP4 (−251326),
GPR125 (+567028); chr4:24585643-24585691/DHX15 (+517); chr4:24801325-24801867/SOD3 (+4511), LGI2
(+230818); chr4:24802053-24802319/SOD3 (+5101), LGI2 (+230228); chr4:26030566-26030635/RBPJ (−29182
8), C4orf52 (+114787); chr4:26275398-26275516/RBPJ (−46972), C4orf52 (+359643); chr4:26322308-2632234
3/RBPJ (−103); chr4:26323036-26323080/RBPJ (+629); chr4:26863173-26863190/STIM2 (+869); chr4:3072003
4-30720054/PCDH7 (−1993); chr4:30724063-30724126/PCDH7 (+2058); chr4:30724538-30724656/PCDH7 (+2
560); chr4:36246208-36246257/ARAP2 (−254); chr4:37245350-37245430/RELL1 (+442609), DTHD1 (+959746);
chr4:37246361-37246489/RELL1 (+441574), DTHD1 (+960781); chr4:37247238-37247293/RELL1 (+440733),
DTHD1 (+961622); chr4:37688502-37688517/RELL1 (−511); chr4:37893212-37893243/TBC1D1 (+523); chr4:3
9448646-39448926/RPL9 (+11421), KLB (+40313); chr4:39640050-39640114/C4orf34 (+399); chr4:39979371-3
9979387/PDS5A (+197); chr4:39979520-39979543/PDS5A (+44); chr4:40632470-40632528/RBM47 (−616); chr
4:40859061-40859189/NSUN7 (+107211), APBB2 (+357510); chr4:41258789-41259085/UCHL1 (+39); chr4:41
362763-41362780/LIMCH1 (−32); chr4:41747769-41747888/PHOX2B (+3158), LIMCH1 (+385025); chr4:41748
012-41748143/PHOX2B (+2909), LIMCH1 (+385274); chr4:41748767-41748856/PHOX2B (+2175), LIMCH1 (+3
86008); chr4:41753917-41754030/PHOX2B (−2987); chr4:41867516-41867612/PHOX2B (−116577), TMEM33
(−69573); chr4:41880420-41880554/PHOX2B (−129500), TMEM33 (−56650); chr4:41881118-41881201/PHOX2B
(−130173), TMEM33 (−55977); chr4:41882113-41882162/PHOX2B (−131151), TMEM33 (−54999); chr4:41882533-
41882651/PHOX2B (−131605), TMEM33 (−54545); chr4:42152766-42152961/SHISA3 (−246992), SLC30A9 (+1
60341); chr4:42153473-42153499/SHISA3 (−246370), SLC30A9 (+160963); chr4:42401197-42401268/SHISA3
(+1377), ATP8A1 (+257889); chr4:44449570-44449652/KCTD8 (+1213); chr4:44450347-44450386/KCTD8 (+45
7); chr4:47839623-47839675/CORIN (+410); chr4:48343315-48343332/SLAIN2 (−289); chr4:48492619-484932
27/ZAR1 (+614); chr4:48987806-48987843/CWH43 (−440); chr4:52708986-52709038/DCUN1D4 (−264); chr4:52
904168-52904227/SGCB (+287); chr4:52904419-52904505/SGCB (+23); chr4:52942957-52943214/SPATA18
(+25493), USP46 (+582416); chr4:53525596-53525634/USP46 (−113); chr4:53578649-53578692/USP46 (−5316
9), ERVMER34-1 (+39136); chr4:53588155-53588204/USP46 (−62678), ERVMER34-1 (+29627); chr4:5495802
3-54958072/CHIC2 (−27233), GSX2 (−8200); chr4:54967964-54968025/PDGFRA (−127269), GSX2 (+1747); chr
4:54975392-54975515/PDGFRA (−119810), GSX2 (+9206); chr4:54975932-54975990/PDGFRA (−119303), GS
X2 (+9713); chr4:54976116-54976170/PDGFRA (−119121), GSX2 (+9895); chr4:55093833-55093888/PDGFRA
(−1403); chr4:55098093-55098197/KIT (−425950), PDGFRA (+2881); chr4:55523467-55523514/KIT (−604); chr
4:55991639-55991802/KDR (+41); chr4:55992090-55992152/KDR (−359); chr4:56659867-56659934/NMU (−157
436), EXOC1 (−59915); chr4:56719793-56719823/EXOC1 (−8); chr4:57302172-57302192/PPAT (−380), PAICS
(−87); chr4:57333497-57333548/SRP72 (−239); chr4:57521396-57521505/HOPX (+1237), ARL9 (+150076); chr4:
57521664-57521700/HOPX (+1006), ARL9 (+150307); chr4:57522383-57522419/HOPX (+287); chr4:6206607
1-62066133/LPHN3 (−296737); chr4:62068202-62068237/LPHN3 (−294619); chr4:62321693-62321779/LPHN3
(−41103); chr4:66535315-66535350/EPHA5 (+320); chr4:66535483-66535574/EPHA5 (+124); chr4:68566624-68
566656/UBA6 (+249); chr4:69215398-69215434/TMPRSS11B (−104004), TMPRSS11E (−97751); chr4:7175822
1-71758376/GRSF1 (−52672), MOB1B (−9758); chr4:71768508-71768550/MOB1B (+472); chr4:74735148-7473
5193/CXCL1 (+62); chr4:74864269-74864367/CXCL5 (+98); chr4:76439484-76439548/THAP6 (−138), RCHY1
(+124); chr4:77342211-77342244/SHROOM3 (−14025), STBD1 (+115049); chr4:77901550-77901649/SEPT11
(+30705), CCNI (+95525); chr4:78078131-78078154/CCNG2 (−214); chr4:79472983-79473033/ANXA3 (+266); c
hr4:81188316-81188384/FGF5 (+608); chr4:81189661-81189713/BMP3 (−762432), FGF5 (+1945); chr4:819523
12-81952363/BMP3 (+219); chr4:82135888-82135919/PRKG2 (−9690), RASGEF1B (+257157); chr4:82136205-
82136243/PRKG2 (−10010), RASGEF1B (+256837); chr4:82393087-82393128/RASGEF1B (−47); chr4:8329491
8-83294938/HNRNPD (+221); chr4:83295242-83295288/HNRNPD (−116); chr4:83350955-83351016/ENOPH1
(−740), HNRPDL (+392); chr4:83718924-83718966/TMEM150C (−235819), SCD5 (+1065); chr4:83931598-8393
1737/LIN54 (+314); chr4:83931932-83931963/LIN54 (+34); chr4:84029494-84029519/COPS4 (+73268), COQ2
(+176560); chr4:84406384-84406406/FAM175A (−105); chr4:85403928-85403980/NKX6-1 (+15433), AGPAT9
(+946297); chr4:85404141-85404224/NKX6-1 (+15204), AGPAT9 (+946526); chr4:85404476-85404649/NKX6-1
(+14824), AGPAT9 (+946906); chr4:85414114-85414148/NKX6-1 (+5256), AGPAT9 (+956474); chr4:8541434
4-85414390/NKX6-1 (+5020), AGPAT9 (+956710); chr4:85418223-85418264/NKX6-1 (+1143), AGPAT9 (+9605
87); chr4:85418370-85418521/NKX6-1 (+941); chr4:85418652-85419120/NKX6-1 (+501); chr4:85419641-8541
9661/NKX6-1 (−264); chr4:85421257-85421286/NKX6-1 (−1885); chr4:85422929-85422972/NKX6-1 (−3564); chr
4:85503911-85503985/CDS1 (−109); chr4:87856067-87856109/AFF1 (−66); chr4:89079808-89079844/ABCG2
(+185); chr4:89205873-89205908/PPM1K (−3); chr4:89378767-89378831/HERC5 (+531); chr4:89444834-89444
887/PIGY (−1921), PIGY (+94); chr4:90759056-90759130/SNCA (−743); chr4:93226704-93226728/GRID2 (+116
6); chr4:94755858-94756001/SMARCAD1 (−372829), ATOH1 (+5852); chr4:95373533-95373607/PDLIM5 (+53
2); chr4:100815225-100815264/LAMTOR3 (+458); chr4:100867744-100867774/DNAJB14 (+120); chr4:100867
923-100867945/DNAJB14 (−55); chr4:100871984-100872096/DNAJB14 (−4161), H2AFZ (−528); chr4:10271187
8-102712137/BANK1 (+244); chr4:102712396-102712522/BANK1 (+695); chr4:103681425-103681489/MANBA
(+694); chr4:106395309-106395382/PPA2 (−119); chr4:106816382-106816425/NPNT (−193); chr4:108853438-
108853490/CYP2U1 (+747); chr4:109087826-109087853/LEF1 (+2272), HADH (+176970); chr4:109571893-10
9571956/OSTC (+184); chr4:110223428-110223578/COL25A1 (+296); chr4:110624608-110624637/CASP6 (+6);
chr4:110651003-110651046/PLA2G12A (+217); chr4:111531925-111531943/PITX2 (+31345), ENPEP (+134
705); chr4:111532461-111532704/PITX2 (+30696), ENPEP (+135354); chr4:111533199-111533328/PITX2 (+3
0015), ENPEP (+136035); chr4:111536506-111536561/PITX2 (+26745), ENPEP (+139305); chr4:111536975-1
11537066/PITX2 (+26258), ENPEP (+139792); chr4:111539328-111539478/PITX2 (+23876), ENPEP (+142174);
chr4:111540024-111540186/PITX2 (+23174), ENPEP (+142876); chr4:111540644-111540782/PITX2 (+2256
6), ENPEP (+143484); chr4:111541763-111541842/PITX2 (+21476), ENPEP (+144574); chr4:111542210-1115
42228/PITX2 (+21060), ENPEP (+144990); chr4:111543346-111543403/PITX2 (+19904), ENPEP (+146146); c
hr4:111543696-111543720/PITX2 (+19571), ENPEP (+146479); chr4:111544181-111544298/PITX2 (+19039),
ENPEP (+147011); chr4:111552352-111552419/PITX2 (+10893), ENPEP (+155157); chr4:111554965-1115551
93/PITX2 (+8200), ENPEP (+157850); chr4:111558443-111558498/PITX2 (+4808), ENPEP (+161242); chr4:11
1562377-111562491/PITX2 (+845); chr4:113431855-113431915/NEUROG2 (+5443), ALPK1 (+213386); chr4:1
13432155-113432226/NEUROG2 (+5137), ALPK1 (+213692); chr4:113432504-113432518/NEUROG2 (+4817),
ALPK1 (+214012); chr4:113442186-113442246/NEUROG2 (−4888); chr4:113558407-113558466/C4orf21 (−286),
LARP7 (−175); chr4:113627576-113627681/ANK2 (−343156), LARP7 (+69017); chr4:117847286-117847306/T
RAM1L1 (+159440); chr4:117847459-117847469/TRAM1L1 (+159272); chr4:118006635-118006673/TRAM1L1
(+82); chr4:119606802-119606828/METTL14 (+241); chr4:119757346-119757364/SEC24D (−29); chr4:1197575
08-119757549/SEC24D (−203); chr4:120376029-120376092/AX746903 (−172884), FABP2 (−132745); chr4:1205
48853-120548871/AX746903 (−83); chr4:122685285-122685351/ANXA5 (−67171), TMEM155 (+1022); chr4:122
685891-122686113/TMEM155 (+338); chr4:122744662-122744711/CCNA2 (+401); chr4:123653628-12365367
9/BBS12 (−203); chr4:128554124-128554187/SLC25A31 (−97399); chr4:128700587-128700681/HSPA4L (−2819);
chr4:128886019-128886040/C4orf29 (−431); chr4:134072611-134072676/PCDH10 (+2174); chr4:134073081-
134073127/PCDH10 (+2634); chr4:135122791-135122846/PABPC4L (+84); chr4:140005253-140005291/ELF2
(+55379), CCRN4L (+68329); chr4:140201157-140201192/C4orf49 (+317); chr4:140216129-140216178/C4orf4
9 (−14662), NAA15 (−6522); chr4:140375013-140375054/RAB33B (+73); chr4:140656748-140656857/MGST2
(+69881), MAML3 (+418430); chr4:141294521-141294545/SCOC (+29936), CLGN (+54282); chr4:142142086-1
42142145/ZNF330 (+67); chr4:142558128-142558149/IL15 (+390); chr4:143767385-143767433/INPP4B (+195);
chr4:144107046-144107119/GAB1 (−150900), USP38 (+1013); chr4:144257623-144257671/GAB1 (−336); chr4:
144621440-144621514/FREM3 (+351); chr4:144621897-144621981/FREM3 (−111); chr4:147558382-1475584
76/POU4F2 (−1616); chr4:147560079-147560133/POU4F2 (+61); chr4:147560419-147560459/POU4F2 (+394);
chr4:147561146-147561359/POU4F2 (+1208), TTC29 (+305781); chr4:147561950-147561999/POU4F2 (+193
0), TTC29 (+305059); chr4:147569268-147569278/POU4F2 (+9228), TTC29 (+297761); chr4:147576202-1475
76308/POU4F2 (+16210), TTC29 (+290779); chr4:154709611-154709758/SFRP2 (+543); chr4:154710618-154
710728/SFRP2 (−445); chr4:154711333-154711469/SFRP2 (−1173); chr4:154711696-154711767/SFRP2 (−1504);
chr4:155411211-155411233/DCHS2 (−98773), PLRG1 (+60363); chr4:155411498-155411567/DCHS2 (−9908
4), PLRG1 (+60052); chr4:155663921-155663970/LRAT (−1217); chr4:155664149-155664189/LRAT (−994); chr
4:155666330-155666407/RBM46 (−36058), LRAT (+1206); chr4:156129387-156129443/NPY2R (−366); chr4:15
6297734-156297941/MAP9 (+284); chr4:157997188-157997215/GLRB (−75); chr4:158143466-158143609/GRI
A2 (+1802), FAM198B (+950664); chr4:159091853-159091899/FAM198B (+2326), GRIA2 (+950140); chr4:159
092088-159092154/FAM198B (+2081), GRIA2 (+950385); chr4:159593078-159593172/ETFDH (−152); chr4:159
593324-159593388/ETFDH (+79); chr4:160025211-160025228/RAPGEF2 (−163778), FNIP2 (+335038); chr4:1
65305024-165305059/MARCH1 (−635); chr4:165898706-165898741/TRIM61 (+94); chr4:166795993-16679611
7/TLL1 (+1645); chr4:169753506-169753535/CBR4 (+177947), PALLD (+335304); chr4:169799101-169799248/
CBR4 (+132293), PALLD (+380958); chr4:169799400-169799493/CBR4 (+132021), PALLD (+381230); chr4:1
70695989-170696065/C4orf27 (−16934), MFAP3L (+251402); chr4:170947135-170947173/MFAP3L (+275); chr
4:170948038-170948089/MFAP3L (−635); chr4:171011576-171011647/AADAT (−429); chr4:172734148-172734
188/GALNTL6 (−407); chr4:172734425-172734444/GALNTL6 (−140); chr4:172734860-172735016/GALNTL6
(+363); chr4:173290883-173290935/GALNT7 (−798995), GALNTL6 (+556334); chr4:174422216-174422297/SCR
G1 (−101640), HAND2 (+29121); chr4:174427945-174428046/SCRG1 (−107379), HAND2 (+23382); chr4:17442
8327-174428428/SCRG1 (−107761), HAND2 (+23000); chr4:174429867-174429949/SCRG1 (−109291), HAND2
(+21470); chr4:174430092-174430140/SCRG1 (−109499), HAND2 (+21262); chr4:174432306-174432379/SCR
G1 (−111726), HAND2 (+19035); chr4:174437891-174437937/SCRG1 (−117297), HAND2 (+13464); chr4:17443
9003-174439053/SCRG1 (−118411), HAND2 (+12350); chr4:174442994-174443044/SCRG1 (−122402), HAND2
(+8359); chr4:174444073-174444198/SCRG1 (−123519), HAND2 (+7242); chr4:174445205-174445321/SCRG
1 (−124646), HAND2 (+6115); chr4:174446371-174446507/SCRG1 (−125822), HAND2 (+4939); chr4:17444835
3-174448460/SCRG1 (−127790), HAND2 (+2971); chr4:174450727-174450751/HAND2 (+639); chr4:174452408-
174452460/HAND2 (−1056); chr4:174459375-174459527/CEP44 (−745604), HAND2 (−8073); chr4:176922668-
176922729/GPM6A (+949); chr4:176986786-176986855/GPM6A (−63173), SPATA4 (+130001); chr4:17698718
0-176987206/GPM6A (−63545), SPATA4 (+129629); chr4:183061773-183062010/ODZ3 (−183207); chr4:18306
3973-183063994/ODZ3 (−181115); chr4:183247001-183247110/ODZ3 (+1957), DCTD (+591574); chr4:183369
558-183369579/ODZ3 (+124470), DCTD (+469061); chr4:183370292-183370318/ODZ3 (+125206), DCTD (+46
8325); chr4:183746783-183746880/DCTD (+91798), ODZ3 (+501733); chr4:184827795-184828122/STOX2 (+1
450), ENPP6 (+311155); chr4:184828385-184828423/STOX2 (+1895), ENPP6 (+310710); chr4:185395410-185
395456/IRF2 (+293); chr4:185570395-185570409/CCDC111 (−365), CASP3 (+227); chr4:185942473-18594249
1/SLC25A4 (−121935), HELT (+2399); chr4:186131059-186131101/SNX25 (−204); chr4:186131246-186131284/
SNX25 (−19); chr4:186131636-186131710/SNX25 (+389); chr4:186560307-186560338/PDLIM3 (−103611), SOR
BS2 (+45677); chr4:187113414-187113481/CYP4V2 (+774); chr4:188916495-188916565/ZFP42 (−395); chr4:1
88916749-188916864/ZFP42 (−118); chr4:188917811-188917855/ZFP42 (+908); chr4:188918090-188918127/Z
FP42 (+1184), TRIML2 (+108635); chr4:188953125-188953225/ZFP42 (+36250), TRIML2 (+73569); chr4:1892
03826-189203879/TRIML1 (+143255); chr4:189204177-189204382/TRIML1 (+143682); chr4:190862258-19086
2284/FRG1 (+297); chr4:190935974-190936002/TUBB4Q (−29960), LOC100288255 (+12424); chr4:190938358-
190938429/TUBB4Q (−32366), LOC100288255 (+10018); chr4:190938561-190938675/TUBB4Q (−32590), LOC
100288255 (+9794); chr4:190938980-190939022/TUBB4Q (−32973), LOC100288255 (+9411); chr4:190940206-
190940258/TUBB4Q (−34204), LOC100288255 (+8180); chr4:190940695-190940752/TUBB4Q (−34696), LOC1
00288255 (+7688); chr5:53187-53500/PLEKHG4B (−87029); chr5:53899-54002/PLEKHG4B (−86422); chr5:159
847-160121/SDHA (−58372), PLEKHG4B (+19611); chr5:169287-169412/SDHA (−49006), PLEKHG4B (+28977);
chr5:271500-271535/PDCD6 (−218); chr5:322048-322061/AHRR (+17763), C5orf55 (+121203); chr5:322252-3
22265/AHRR (+17967), C5orf55 (+120999); chr5:322403-322478/AHRR (+18149), C5orf55 (+120817); chr5:34
3893-343915/AHRR (+39612), C5orf55 (+99354); chr5:392741-392815/C5orf55 (+50480), AHRR (+88486); chr
5:403141-403284/C5orf55 (+40045), AHRR (+98921); chr5:442701-442769/EXOC3 (−599), C5orf55 (+523); chr
5:501957-502001/SLC9A3 (+22570), EXOC3 (+58645); chr5:523803-523856/SLC9A3 (+719); chr5:525191-525
232/SLC9A3 (−663); chr5:926927-927008/NKD2 (−82200), TRIP13 (+33999); chr5:1015074-1015189/NKD2 (+5
964), SLC12A7 (+97040); chr5:1060595-1060647/NKD2 (+51453), SLC12A7 (+51551); chr5:1099574-1099610/
SLC12A7 (+12580), NKD2 (+90424); chr5:1108421-1108489/SLC12A7 (+3717), NKD2 (+99287); chr5:1108890-
1108966/SLC12A7 (+3244), NKD2 (+99760); chr5:1246253-1246316/SLC6A18 (+20815), TERT (+48877); chr
5:1295443-1295604/TERT (−362); chr5:1295724-1295758/TERT (−579); chr5:1386677-1386741/CLPTM1L (−41
707), SLC6A3 (+58834); chr5:1444763-1444851/SLC6A3 (+736); chr5:1445256-1445450/SLC6A3 (+190); chr5:
1445760-1445840/SLC6A3 (−257); chr5:1446101-1446236/SLC6A3 (−626); chr5:1446370-1446442/SLC6A3 (−8
63); chr5:1446880-1446927/SLC6A3 (−1361); chr5:1523739-1523788/LPCAT1 (+312); chr5:1523933-1523964/
LPCAT1 (+127); chr5:1633876-1633917/LPCAT1 (−109821), MRPL36 (+166059); chr5:1799461-1799500/NDU
FS6 (−2015), MRPL36 (+475); chr5:1799833-1799910/NDUFS6 (−1624), MRPL36 (+84); chr5:1851448-1851534/
IRX4 (+31389), NDUFS6 (+49995); chr5:1876307-1876637/IRX4 (+6408), NDUFS6 (+74976); chr5:1877103-1
877194/IRX4 (+5731), NDUFS6 (+75653); chr5:1878029-1878223/IRX4 (+4754), NDUFS6 (+76630); chr5:1879
662-1879689/IRX4 (+3204), NDUFS6 (+78180); chr5:1881769-1881828/IRX4 (+1081), NDUFS6 (+80303); chr5:
1882136-1882347/IRX4 (+638); chr5:1882922-1883131/IRX4 (−147); chr5:1883617-1883879/IRX4 (−868); chr5:
1886177-1886227/IRX4 (−3322); chr5:1886842-1886997/IRX4 (−4040); chr5:1887146-1887421/IRX4 (−4404); ch
r5:1887582-1887655/IRX4 (−4739); chr5:1931005-1931064/IRX4 (−48155), IRX2 (+820734); chr5:1931314-1931
352/IRX4 (−48453), IRX2 (+820436); chr5:1931577-1931617/IRX4 (−48717), IRX2 (+820172); chr5:1952639-195
2723/IRX4 (−69801), IRX2 (+799088); chr5:1952861-1952958/IRX4 (−70030), IRX2 (+798859); chr5:2001395-20
01457/IRX4 (−118546), IRX2 (+750343); chr5:2038863-2038947/IRX4 (−156025), IRX2 (+712864); chr5:273913
0-2739210/IRX4 (−856290), IRX2 (+12599); chr5:2739355-2739551/IRX4 (−856573), IRX2 (+12316); chr5:27398
03-2739860/IRX4 (−856952), IRX2 (+11937); chr5:2740301-2740430/IRX4 (−857486), IRX2 (+11403); chr5:2740
665-2741122/IRX4 (−858014), IRX2 (+10875); chr5:2743660-2743698/IRX4 (−860799), IRX2 (+8090); chr5:2748
490-2748549/C5orf38 (−3742), IRX2 (+3249); chr5:2748780-2749065/C5orf38 (−3339), IRX2 (+2846); chr5:2749
407-2749604/C5orf38 (−2756), IRX2 (+2263); chr5:2749777-2749840/C5orf38 (−2453), IRX2 (+1960); chr5:2750
770-2750965/C5orf38 (−1394), IRX2 (+901); chr5:2751404-2751454/C5orf38 (−833), IRX2 (+340); chr5:2752442-
2752508/IRX2 (−706), C5orf38 (+213); chr5:2754807-2754870/IRX2 (−3070), C5orf38 (+2577); chr5:2756603-2
756673/IRX2 (−4869), C5orf38 (+4376); chr5:3118618-3118730/IRX1 (−477494), C5orf38 (+366412); chr5:3197
894-3197991/IRX1 (−398225), C5orf38 (+445681); chr5:3590658-3590803/IRX1 (−5437), C5orf38 (+838469); ch
r5:3591552-3591613/IRX1 (−4585); chr5:3592463-3592642/IRX1 (−3615); chr5:3594520-3594585/IRX1 (−1615);
chr5:3594877-3595055/IRX1 (−1202); chr5:3595369-3595447/IRX1 (−760); chr5:3595587-3595727/IRX1 (−511);
chr5:3596191-3596555/IRX1 (+205); chr5:3596725-3596824/IRX1 (+607); chr5:3599445-3599502/IRX1 (+3306);
chr5:3599608-3600074/IRX1 (+3673); chr5:3600320-3600390/IRX1 (+4187); chr5:3600639-3600732/IRX1
(+4518); chr5:3600866-3600922/IRX1 (+4726); chr5:3602351-3602716/IRX1 (+6366); chr5:3605980-3606058/IRX
1 (+9851); chr5:3606435-3606711/IRX1 (+10405); chr5:5139621-5139753/ADAMTS16 (−756); chr5:5140000-51
40031/ADAMTS16 (−427); chr5:5140456-5140527/ADAMTS16 (+49); chr5:5140758-5140849/ADAMTS16 (+361);
chr5:5887156-5887231/MED10 (+491445), ADAMTS16 (+746751); chr5:5887344-5887387/MED10 (+491273),
ADAMTS16 (+746923); chr5:6632482-6632610/SRD5A1 (−954), NSUN2 (+927); chr5:6714663-6714707/PAP
D7 (−33); chr5:7395079-7395160/ADCY2 (−1223); chr5:7395394-7395433/ADCY2 (−929); chr5:7849835-784994
5/FASTKD3 (+19260), ADCY2 (+453547); chr5:7851384-7851409/FASTKD3 (+17753), ADCY2 (+455054); chr5:
10333158-10333224/CMBL (−25023), MARCH6 (−20637); chr5:10442305-10442372/ROPN1L (+365); chr5:105
64659-10564800/ROPN1L (+122756), DAP (+196657); chr5:10565228-10565262/ROPN1L (+123271), DAP (+1
96142); chr5:11384580-11384964/DAP (−623385), CTNND2 (+519338); chr5:11903725-11903821/CTNND2 (+3
37); chr5:11904174-11904195/CTNND2 (−75); chr5:11904380-11904455/CTNND2 (−308); chr5:14144105-1414
4285/TRIO (+366); chr5:14144958-14144980/TRIO (+1140), ANKH (+726918); chr5:15500689-15500735/FBXL
7 (+407); chr5:16179153-16179266/MARCH11 (+687); chr5:16179407-16179554/MARCH11 (+416); chr5:1617
9800-16179942/MARCH11 (+26); chr5:16180162-16180182/MARCH11 (−275); chr5:16180321-16180371/MAR
CH11 (−449); chr5:17217865-17217991/BASP1 (+178); chr5:17218934-17218985/BASP1 (+1210); chr5:172192
82-17219325/BASP1 (+1554); chr5:31194291-31194311/CDH6 (+539); chr5:31194695-31194760/CDH6 (+966);
chr5:31639088-31639164/PDZD2 (−159870), DROSHA (−106844); chr5:32313142-32313198/MTMR12 (−56); c
hr5:32712102-32712289/NPR3 (+758); chr5:32713577-32713744/TARS (−727237), NPR3 (+2223); chr5:33936
945-33936969/RXFP3 (+466); chr5:34915405-34915469/BRIX1 (−383), RAD1 (+343); chr5:35925899-35925952/
CAPSL (+12955), IL7R (+68935); chr5:36066909-36066939/UGT3A2 (+99); chr5:37834737-37835014/NUP155
(−463679), GDNF (+1053); chr5:37835350-37835441/GDNF (+533); chr5:37839736-37839807/GDNF (−3843);
chr5:37840220-37840267/GDNF (−4315); chr5:37840460-37840479/GDNF (−4541); chr5:38257909-38257944/E
GFLAM (−584); chr5:38467507-38467658/LIFR (+127924), EGFLAM (+209072); chr5:38556361-38556411/LIFR
(+39121), EGFLAM (+297875); chr5:38556674-38556773/LIFR (+38783), EGFLAM (+298213); chr5:38846165-
38846468/OSMR (+216); chr5:38846840-38846966/OSMR (+802); chr5:40681228-40681261/PTGER4 (+1213),
TTC33 (+74827); chr5:40681875-40681954/PTGER4 (+1883), TTC33 (+74157); chr5:41637483-41637613/PL
CXD3 (−126818), OXCT1 (+233243); chr5:41904703-41904762/OXCT1 (−33942), FBXO4 (−20623); chr5:419258
07-41925876/FBXO4 (+486); chr5:42423530-42423573/GHR (−325); chr5:42944317-42944377/SEPP1 (−13232
3), C5orf39 (+96100); chr5:42951312-42951419/SEPP1 (−139342), C5orf39 (+89081); chr5:42952164-4295246
1/SEPP1 (−140289), C5orf39 (+88134); chr5:42952604-42952683/SEPP1 (−140620), C5orf39 (+87803); chr5:42
992242-42992375/SEPP1 (−180285), C5orf39 (+48138); chr5:42992598-42992782/SEPP1 (−180666), C5orf39
(+47757); chr5:42994983-42995072/SEPP1 (−183004), C5orf39 (+45419); chr5:43000639-43000675/SEPP1 (−1
88633), C5orf39 (+39790); chr5:43018177-43018326/SEPP1 (−206228), C5orf39 (+22195); chr5:43039678-430
39708/C5orf39 (+754); chr5:43556777-43556875/PAIP1 (+369); chr5:44389609-44389781/FGF10 (−911); chr5:
45695240-45695313/HCN1 (+943); chr5:45695608-45695648/HCN1 (+592); chr5:45695964-45696137/HCN1
(+169); chr5:49736978-49737098/EMB (+196); chr5:50258952-50259012/ISL1 (−419976), PARP8 (+296210); ch
r5:50265166-50265190/ISL1 (−413780), PARP8 (+302406); chr5:50265672-50265720/ISL1 (−413262), PARP8
(+302924); chr5:50683846-50683913/ISL1 (+4922); chr5:50685355-50685653/ISL1 (+6546); chr5:50685796-506
85846/ISL1 (+6863); chr5:50695298-50695350/ISL1 (+16366); chr5:53606372-53606415/ARL15 (+9); chr5:538
14373-53814453/SNX18 (+820); chr5:54179409-54179429/ESM1 (+101995), SNX18 (+365826); chr5:5417955
8-54179609/ESM1 (+101830), SNX18 (+365991); chr5:54468808-54468870/GPX8 (+12855), IDAS (+54304); c
hr5:54516681-54516831/IDAS (+6387), GPX8 (+60772); chr5:54519289-54519382/IDAS (+3807), GPX8 (+633
52); chr5:54527167-54527322/IDAS (−4102); chr5:54527636-54527844/IDAS (−4597); chr5:54831048-54831085/
PPAP2A (−194); chr5:55117662-55117821/IL31RA (−29465), DDX4 (+83897); chr5:55885079-55885214/IL6ST
(−594326), MAP3K1 (−225753); chr5:56247744-56247777/MIER3 (+193); chr5:59105924-59105973/PDE4D (+8
3672); chr5:59188212-59188275/PDE4D (+1377); chr5:60241477-60241550/ERCC8 (−609), NDUFAF2 (+558);
chr5:60921604-60921662/C5orf64 (−12003), ZSWIM6 (+293533); chr5:60921839-60922050/C5orf64 (−11691),
ZSWIM6 (+293845); chr5:60922295-60922459/C5orf64 (−11259), ZSWIM6 (+294277); chr5:63255243-6325531
5/HTR1A (+2267); chr5:63257019-63257086/HTR1A (+493); chr5:63801781-63801804/RGS7BP (−659); chr5:6
3802305-63802339/RGS7BP (−130); chr5:63986528-63986569/FAM159B (+414); chr5:65891980-65892018/MA
ST4 (−177); chr5:67512205-67512261/PIK3R1 (+649); chr5:68513626-68513675/MRPS36 (+78); chr5:6871114
7-68711333/MARVELD2 (+301); chr5:68711450-68711489/MARVELD2 (+531); chr5:70363417-70363470/GTF
2H2 (+53); chr5:71014979-71015031/CARTPT (+15); chr5:72112362-72112410/ZNF366 (−309137), TNPO1 (−3
1544); chr5:72415923-72416022/TMEM171 (−415); chr5:72511748-72511765/TMEM174 (+42734), FOXD1 (+2
32595); chr5:72526066-72526136/TMEM174 (+57078), FOXD1 (+218251); chr5:72526415-72526491/TMEM17
4 (+57430), FOXD1 (+217899); chr5:72528110-72528189/TMEM174 (+59127), FOXD1 (+216202); chr5:725298
26-72529889/TMEM174 (+60835), FOXD1 (+214494); chr5:72594127-72594267/TMEM174 (+125174), FOXD1
(+150155); chr5:72594382-72594494/TMEM174 (+125415), FOXD1 (+149914); chr5:72594837-72594867/TM
EM174 (+125829), FOXD1 (+149500); chr5:72595017-72595046/TMEM174 (+126009), FOXD1 (+149320); chr
5:72595722-72595773/TMEM174 (+126725), FOXD1 (+148604); chr5:72598983-72599059/TMEM174 (+12999
8), FOXD1 (+145331); chr5:72599442-72599462/TMEM174 (+130429), FOXD1 (+144900); chr5:72677353-726
77649/FOXD1 (+66851), TMEM174 (+208478); chr5:72677826-72677997/FOXD1 (+66440), TMEM174 (+2088
89); chr5:72678281-72678352/FOXD1 (+66035), TMEM174 (+209294); chr5:72715348-72715590/FOXD1 (+28
883), TMEM174 (+246446); chr5:72715696-72715730/FOXD1 (+28639), TMEM174 (+246690); chr5:72731960-
72732016/FOXD1 (+12364), TMEM174 (+262965); chr5:72732713-72732869/FOXD1 (+11561), TMEM174 (+2
63768); chr5:72746684-72746729/FOXD1 (−2355); chr5:73935988-73936032/ENC1 (+1239); chr5:74348895-74
348906/HMGCR (−284092), GCNT4 (−22177); chr5:74632624-74632654/HMGCR (−354); chr5:75377800-75377
859/SV2C (−1475); chr5:76114396-76114443/F2RL1 (−413); chr5:76115773-76115809/F2RL1 (+958); chr5:762
49671-76249695/AGGF1 (−76527), CRHBP (+1003); chr5:76249907-76249944/AGGF1 (−76284), CRHBP (+12
46); chr5:76373468-76373514/ZBED3 (+9539), AGGF1 (+47281); chr5:76924024-76924086/OTP (+10467), PD
E8B (+417349); chr5:76924300-76924416/OTP (+10164), PDE8B (+417652); chr5:76933266-76933464/OTP
(+1157), PDE8B (+426659); chr5:76934654-76934676/OTP (−143); chr5:76937423-76937510/OTP (−2945); chr5:
76939219-76939435/OTP (−4805); chr5:76941498-76941512/OTP (−6983), TBCA (+130680); chr5:77072139-77
072279/TBCA (−24); chr5:77140805-77140867/TBCA (−68651), AP3B1 (+449692); chr5:77253511-77253595/T
BCA (−181368), AP3B1 (+336975); chr5:77253868-77253986/TBCA (−181742), AP3B1 (+336601); chr5:772692
38-77269263/TBCA (−197066), AP3B1 (+321277); chr5:77589859-77589930/AP3B1 (+633); chr5:77657214-77
657286/SCAMP1 (+911); chr5:77805898-77805966/LHFPL2 (+138716), SCAMP1 (+149593); chr5:78279886-7
8279959/LHFPL2 (−335275), ARSB (+2434); chr5:78365254-78365502/BHMT2 (−169), DMGDH (+71); chr5:783
65624-78365661/DMGDH (−194), BHMT2 (+96); chr5:78407951-78408016/BHMT (+380); chr5:78408275-7840
8297/BHMT (+682); chr5:79331337-79331476/THBS4 (+237); chr5:79865445-79865522/ANKRD34B (+820); ch
r5:79865703-79865744/ANKRD34B (+580); chr5:79865955-79865994/ANKRD34B (+329); chr5:79950171-7995
0247/MTRNR2L2 (−3355), MSH3 (−85), DHFR (+591); chr5:79950637-79950703/MTRNR2L2 (−3816), DHFR (+1
30), MSH3 (+376); chr5:80256078-80256086/RASGRF2 (−426); chr5:80256370-80256428/RASGRF2 (−109); ch
r5:80256808-80256887/RASGRF2 (+340); chr5:80529120-80529162/CKMT2 (+2); chr5:80597287-80597322/Z
CCHC9 (−97); chr5:80689795-80689879/ACOT12 (+151); chr5:81045632-81045675/ACOT12 (−355666), SSBP
2 (+1418); chr5:81047476-81047532/SSBP2 (−432); chr5:83680665-83680693/EDIL3 (−68); chr5:87440120-874
40140/CCNH (−731280), TMEM161B (+124535); chr5:87440271-87440313/CCNH (−731442), TMEM161B (+124
373); chr5:87955665-87955839/TMEM161B (−391087), MEF2C (+244170); chr5:87956663-87956679/TMEM16
1B (−392006), MEF2C (+243251); chr5:87968686-87968772/TMEM161B (−404064), MEF2C (+231193); chr5:92
906372-92906455/NR2F1 (−12629); chr5:92906565-92906681/NR2F1 (−12420); chr5:92907994-92908050/NR2
F1 (−11021); chr5:92908189-92908391/NR2F1 (−10753); chr5:92908640-92908770/NR2F1 (−10338); chr5:9291
5047-92915099/NR2F1 (−3970); chr5:92923383-92923469/NR2F1 (+4383), POU5F2 (+153883); chr5:92923716-
92923992/NR2F1 (+4811), POU5F2 (+153455); chr5:92930704-92930781/NR2F1 (+11700), POU5F2 (+14656
6); chr5:92932669-92932926/NR2F1 (+13755), POU5F2 (+144511); chr5:92934430-92934478/NR2F1 (+15411),
POU5F2 (+142855); chr5:92938012-92938365/NR2F1 (+19146), POU5F2 (+139120); chr5:93446909-934469
62/FAM172A (+468); chr5:95297416-95297447/ELL2 (+343); chr5:100239120-100239134/ST8SIA4 (−140); chr5:
100240145-100240232/ST8SIA4 (−1202); chr5:102090549-102090600/SLCO6A1 (−255855), PAM (−110952); c
hr5:107004952-107005046/EFNA5 (+1597); chr5:108085256-108085316/FER (+1763), PJA2 (+660389); chr5:1
10074216-110074272/SLC25A46 (−510); chr5:110406444-110406532/TSLP (−902); chr5:110427862-11042791
8/WDR36 (+20); chr5:110560119-110560138/CAMK4 (+182); chr5:111093425-111093474/STARD4 (−245293),
NREP (+219178); chr5:111496500-111496549/NREP (−183897), EPB41L4A (+258485); chr5:111496958-11149
7007/NREP (−184355), EPB41L4A (+258027); chr5:112043772-112043800/EPB41L4A (−288776), APC (−29770);
chr5:113698264-113698330/KCNN2 (+281); chr5:113698584-113698669/KCNN2 (+611); chr5:113698844-11
3698951/KCNN2 (+882); chr5:114193690-114193762/TRIM36 (+322517), KCNN2 (+495710); chr5:114514825-
114515009/TRIM36 (+1326), KCNN2 (+816901); chr5:114515580-114515610/TRIM36 (+648); chr5:114515728-
114515769/TRIM36 (+494); chr5:114879580-114879637/FEM1C (+982); chr5:115151358-115151649/CDO1
(+901); chr5:115152385-115152491/CDO1 (−33); chr5:115297293-115297376/AQPEP (−816); chr5:115297986-11
5298204/AQPEP (−56); chr5:115298582-115298781/AQPEP (+531); chr5:121297445-121297504/SRFBP1 (−18
1); chr5:122422315-122422508/PRDM6 (−2429); chr5:122423432-122423573/PRDM6 (−1338); chr5:122425641-
122425701/PRDM6 (+830); chr5:122425956-122426004/PRDM6 (+1139), CEP120 (+333306); chr5:12242670
7-122426796/PRDM6 (+1911), CEP120 (+332534); chr5:122433905-122434262/PRDM6 (+9243), CEP120 (+3
25202); chr5:122434528-122434605/PRDM6 (+9726), CEP120 (+324719); chr5:122435163-122435201/PRDM
6 (+10341), CEP120 (+324104); chr5:122435303-122435413/PRDM6 (+10517), CEP120 (+323928); chr5:1224
35535-122435628/PRDM6 (+10741), CEP120 (+323704); chr5:122621183-122621308/CEP120 (+138040), PR
DM6 (+196405); chr5:122759492-122759518/CEP120 (−219); chr5:126408755-126408818/C5orf63 (+397); chr5:
127872738-127872819/FBN2 (+956); chr5:127873180-127873396/FBN2 (+447); chr5:128300695-128300712/
SLC27A6 (−506); chr5:128300874-128300900/SLC27A6 (−323); chr5:129240935-129240962/CHSY3 (+426); chr
5:131131944-131132056/RAPGEF6 (−161071), ACSL6 (+215355); chr5:131563531-131563558/P4HA2 (+11); c
hr5:131593412-131593472/PDLIM4 (+91); chr5:131630561-131630593/SLC22A4 (+432); chr5:131832433-131
832488/IRF1 (−5996), IL5 (+46753); chr5:132083441-132083471/CCNI2 (+319); chr5:132147925-132147995/S
EPT8 (−34893), SHROOM1 (+14042); chr5:132148933-132148947/SEPT8 (−35873), SHROOM1 (+13062); chr5:
132149780-132149912/SEPT8 (−36779), SHROOM1 (+12156); chr5:132150223-132150248/SEPT8 (−37169),
SHROOM1 (+11766); chr5:132158547-132158771/SEPT8 (−45592), SHROOM1 (+3343); chr5:132161118-1321
61483/SHROOM1 (+701); chr5:132161711-132161807/SHROOM1 (+243); chr5:132166250-132166278/SHRO
OM1 (−4262); chr5:132202143-132202173/GDF9 (−1681), UQCRQ (−161); chr5:132362050-132362099/ZCCHC
10 (+165); chr5:133304067-133304123/C5orf15 (+311); chr5:133449335-133449376/TCF7 (−1046); chr5:13351
2118-133512160/SKP1 (+585); chr5:133707557-133707618/CDKL3 (−4823), UBE2B (+718); chr5:133984051-1
33984104/SEC24A (−397); chr5:134094985-134095038/DDX46 (+551); chr5:134363127-134363613/PITX1 (+6
594), CATSPER3 (+59774); chr5:134363827-134364128/PITX1 (+5986), CATSPER3 (+60382); chr5:13436450
4-134364573/PITX1 (+5425), CATSPER3 (+60943); chr5:134364881-134364967/PITX1 (+5040), CATSPER3
(+61328); chr5:134367266-134367284/PITX1 (+2689), CATSPER3 (+63679); chr5:134370453-134370508/PITX
1 (−517); chr5:134373713-134373776/PITX1 (−3781); chr5:134374506-134374791/PITX1 (−4685); chr5:1343765
57-134376731/PITX1 (−6680), H2AFY (+358284); chr5:134386168-134386184/PITX1 (−16212), H2AFY (+34875
2); chr5:134802500-134802534/C5orf20 (−19479), NEUROG1 (+69122); chr5:134825106-134825179/C5orf20
(−42105), NEUROG1 (+46496); chr5:134825817-134825896/C5orf20 (−42819), NEUROG1 (+45782); chr5:13482
6260-134826479/C5orf20 (−43332), NEUROG1 (+45269); chr5:134827285-134827472/C5orf20 (−44341), NEUR
OG1 (+44260); chr5:134870927-134871181/NEUROG1 (+585); chr5:134871325-134871417/NEUROG1 (+268);
chr5:134872609-134872658/NEUROG1 (−995); chr5:134880023-134880048/NEUROG1 (−8397), CXCL14 (+3
4933); chr5:135265860-135265919/IL9 (−34374), LECT2 (+24833); chr5:135266134-135266515/IL9 (−34809), L
ECT2 (+24398); chr5:136834189-136834289/SPOCK1 (+779); chr5:136834664-136834706/SPOCK1 (+333); c
hr5:136834881-136834912/SPOCK1 (+121); chr5:137090010-137090063/HNRNPA0 (+2); chr5:137090648-137
090698/HNRNPA0 (−634); chr5:137225014-137225091/PKD2L2 (−72); chr5:137513960-137513999/KIF20A (−43
7), BRD8 (+378); chr5:137549085-137549135/CDC23 (−78); chr5:137610257-137610301/GFRA3 (−26); chr5:13
7795169-137795219/EGR1 (−5987), REEP2 (+20418); chr5:138727908-138727987/MZB1 (−2343); chr5:138729
681-138729700/MZB1 (−4086); chr5:138729814-138730050/MZB1 (−4327); chr5:138850540-138850605/ECSC
R (−8253), TMEM173 (+11770); chr5:139038107-139038230/PSD2 (−137237), CXXC5 (+9868); chr5:13904973
3-139049781/PSD2 (−125649), CXXC5 (+21456); chr5:139089678-139089811/PSD2 (−85661), CXXC5 (+61444);
chr5:139128153-139128219/PSD2 (−47220), CXXC5 (+99885); chr5:139144057-139144114/PSD2 (−31320),
CXXC5 (+115785); chr5:139145148-139145195/PSD2 (−30234), CXXC5 (+116871); chr5:139175877-13917592
9/PSD2 (+497); chr5:139227624-139227704/PSD2 (+52258), NRG2 (+195220); chr5:139525948-139526053/IG
IP (+20480), PFDN1 (+156688); chr5:140012022-140012125/CD14 (+961); chr5:140012293-140012364/CD14
(+706); chr5:140026762-140026831/IK (−587), NDUFA2 (+573); chr5:140174840-140174937/PCDHAC2 (−17085
8), ZMAT2 (+94857); chr5:140201463-140201495/PCDHAC2 (−144268), ZMAT2 (+121447); chr5:140255093-1
40255158/PCDHAC2 (−90621), ZMAT2 (+175094); chr5:140256762-140256790/PCDHAC2 (−88971), ZMAT2
(+176744); chr5:140306204-140306236/PCDHAC2 (−39527), ZMAT2 (+226188); chr5:140306620-140306674/PC
DHAC2 (−39100), ZMAT2 (+226615); chr5:140306787-140307010/PCDHAC2 (−38848), ZMAT2 (+226867); chr5:
140474300-140474330/PCDHB2 (+78); chr5:140517295-140517346/PCDHB6 (−12518), PCDHB5 (+2521); chr
5:140531504-140531532/PCDHB17 (−4062); chr5:140614329-140614383/PCDHB18 (+418); chr5:140615816-1
40615861/PCDHB15 (−9308), PCDHB18 (+1901); chr5:140625017-140625088/PCDHB15 (−94); chr5:14071035
7-140710436/PCDHGC5 (−158411), TAF7 (−10046); chr5:140718631-140718773/PCDHGC5 (−150106), TAF7
(−18351); chr5:140723683-140723731/PCDHGC5 (−145101), TAF7 (−23356); chr5:140731143-140731239/PCDH
GC5 (−137617), TAF7 (−30840); chr5:140734850-140734930/PCDHGC5 (−133918), TAF7 (−34539); chr5:14073
9801-140739851/PCDHGC5 (−128982), TAF7 (−39475); chr5:140744003-140744075/PCDHGC5 (−124769), TAF
7 (−43688); chr5:140744471-140744520/PCDHGC5 (−124312), TAF7 (−44145); chr5:140762644-140762703/PC
DHGC5 (−106134), TAF7 (−62323); chr5:140773098-140773155/PCDHGC5 (−95681), TAF7 (−72776); chr5:1407
78297-140778362/PCDHGC5 (−90478), TAF7 (−77979); chr5:140782687-140782778/PCDHGC5 (−86075), TAF7
(−82382); chr5:140787473-140787622/TAF7 (−87197), PCDHGC5 (−81260); chr5:140792683-140792786/TAF7
(−92384), PCDHGC5 (−76073); chr5:140792989-140793011/TAF7 (−92649), PCDHGC5 (−75808); chr5:1407934
01-140793467/TAF7 (−93083), PCDHGC5 (−75374); chr5:140797279-140797327/TAF7 (−96952), PCDHGC5 (−7
1505); chr5:140800965-140801034/TAF7 (−100649), PCDHGC5 (−67808); chr5:140810494-140810509/TAF7
(−110151), PCDHGC5 (−58306); chr5:140810984-140811135/TAF7 (−110709), PCDHGC5 (−57748); chr5:140856
459-140856546/TAF7 (−156152), PCDHGC5 (−12305); chr5:140864527-140864611/PCDHGC5 (−4239); chr5:14
0871022-140871437/PCDHGC5 (+2422), DIAPH1 (+127392); chr5:140871987-140872153/PCDHGC5 (+3262),
DIAPH1 (+126552); chr5:140892924-140892995/PCDHGC5 (+24152), DIAPH1 (+105662); chr5:141016096-14
1016113/RELL2 (−412), HDAC3 (+318); chr5:141133242-141133302/ARAP3 (−71472), PCDH1 (+124672); chr5:
141138187-141138346/ARAP3 (−76467), PCDH1 (+119677); chr5:141153728-141153844/ARAP3 (−91986), PC
DH1 (+104158); chr5:141263143-141263260/KIAA0141 (−40183), PCDH1 (−5258); chr5:141931355-141931424/
SPRY4 (−226770), FGF1 (+134263); chr5:142782499-142782625/NR3C1 (+1483), ARHGAP26 (+632270); chr5:
142782749-142782794/NR3C1 (+1273), ARHGAP26 (+632480); chr5:145235973-145236058/SH3RF2 (−80110),
PRELID2 (−21117); chr5:145717197-145717248/POU4F3 (−1364); chr5:145718395-145718419/POU4F3 (−18
0); chr5:145719754-145719834/TCERG1 (−107079), POU4F3 (+1207); chr5:145719937-145720018/TCERG1
(−106895), POU4F3 (+1391); chr5:145722467-145722560/TCERG1 (−104359), POU4F3 (+3927); chr5:14572518
8-145725693/TCERG1 (−101432), POU4F3 (+6854); chr5:145941101-145941258/GPR151 (−45504), PPP2R2B
(+494520); chr5:146889183-146889331/DPYSL3 (+362); chr5:148033793-148033820/ADRB2 (−172349), HTR4
(−17183); chr5:148620095-148620228/AFAP1L1 (−31239), ABLIM3 (+99108); chr5:148802147-148802246/IL17
B (−43359), CSNK1A1 (+128810); chr5:149109746-149109802/PPARGC1B (−41); chr5:149461436-149461530/
TIGD6 (−80753), CSF1R (+31452); chr5:149546388-149546429/CDX1 (+65); chr5:149546603-149546648/CDX
1 (+282); chr5:149589025-149589167/SLC6A7 (+19576), CAMK2A (+80307); chr5:149682792-149682867/ARS
I (−305); chr5:149792111-149792156/CD74 (+365); chr5:149865962-149866009/RPS14 (−36667), NDST1 (−216
88); chr5:150080379-150080559/RBM22 (+200); chr5:150158205-150158234/C5orf62 (+712); chr5:150158781-
150158831/IRGM (−67279), C5orf62 (+1298); chr5:150226251-150226474/IRGM (+278); chr5:150460749-1504
60814/TNIP1 (+5965), GPX3 (+60783); chr5:150537062-150537108/ANXA6 (+358); chr5:150603552-15060358
9/ANXA6 (−66128), GM2A (−29042); chr5:151150228-151150270/G3BP1 (−1227); chr5:151304639-151304708/
GLRA1 (−277); chr5:153853304-153853386/HAND1 (+4479), SAP30L (+27828); chr5:153855411-153855657/H
AND1 (+2290), SAP30L (+30017); chr5:153855927-153856148/HAND1 (+1786), SAP30L (+30521); chr5:15385
7198-153857284/HAND1 (+583); chr5:153858895-153858916/HAND1 (−1082); chr5:153862180-153862218/HA
ND1 (−4375); chr5:153873055-153873085/LARP1 (−219392), HAND1 (−15246); chr5:154291297-154291417/GE
MIN5 (+26419), CNOT8 (+53158); chr5:155108084-155108160/SGCD (−645645), KIF4B (+714862); chr5:15510
8268-155108355/SGCD (−645455), KIF4B (+715052); chr5:155109104-155109188/SGCD (−644621), KIF4B (+7
15886); chr5:157098855-157098904/THG1L (−59443), SOX30 (−19452); chr5:158478466-158478512/EBF1 (+4
8299); chr5:158524532-158524640/EBF1 (+2202); chr5:158531993-158532073/EBF1 (−5245), RNF145 (+1028
01); chr5:158690346-158690379/UBLCP1 (+274); chr5:158690530-158690602/UBLCP1 (+477); chr5:15873761
7-158737662/IL12B (+19841), UBLCP1 (+47551); chr5:159399165-159399375/TTC1 (−36910), ADRA1B (+555
30); chr5:159436043-159436105/TTC1 (−106); chr5:160974514-160974540/GABRB2 (+603); chr5:160975934-1
60975955/GABRB2 (−815); chr5:161275152-161275346/GABRA1 (−2143); chr5:167956267-167956413/FBLL1
(−242); chr5:167956823-167956844/FBLL1 (+252); chr5:168727101-168727164/PANK3 (−720519), SLIT3 (+100
0); chr5:168727928-168727994/SLIT3 (+172); chr5:168728728-168728889/SLIT3 (−676); chr5:169729914-1697
29981/KCNIP1 (−50933), LCP2 (−5126); chr5:169931171-169931223/GABRP (−279526), KCNMB1 (−114559); ch
r5:169931327-169931353/GABRP (−279383), KCNMB1 (−114702); chr5:169931542-169931584/GABRP (−2791
60), KCNMB1 (−114925); chr5:170735321-170735684/TLX3 (−785); chr5:170736164-170736715/TLX3 (+152); c
hr5:170736831-170736897/TLX3 (+576); chr5:170737032-170737168/TLX3 (+812); chr5:170737864-17073793
5/NPM1 (−76808), TLX3 (+1612); chr5:170738690-170738823/NPM1 (−75951), TLX3 (+2469); chr5:170740478-
170740574/NPM1 (−74182), TLX3 (+4238); chr5:170741325-170741358/NPM1 (−73366), TLX3 (+5054); chr5:17
0742276-170742386/NPM1 (−72377), TLX3 (+6043); chr5:170742600-170742672/NPM1 (−72072), TLX3 (+6348);
chr5:170743480-170743646/NPM1 (−71145), TLX3 (+7275); chr5:170847488-170847602/FGF18 (+878); chr5:
170877802-170877839/FGF18 (+31154), FBXW11 (+556056); chr5:170877961-170878093/FGF18 (+31360),
FBXW11 (+555850); chr5:170878233-170878251/FGF18 (+31575), FBXW11 (+555635); chr5:171433895-1714
33957/FBXW11 (−49); chr5:171605336-171605413/FBXW11 (−171498), STK10 (+9971); chr5:171614516-1716
14531/STK10 (+822); chr5:171710003-171710067/UBTD2 (+760); chr5:172068150-172068212/NEURL1B (−95);
chr5:172300081-172300114/RPL26L1 (−86341), ERGIC1 (+38875); chr5:172660026-172660141/NKX2-5 (+22
31), BNIP1 (+88639); chr5:172661001-172661126/NKX2-5 (+1251), BNIP1 (+89619); chr5:172663242-1726633
60/NKX2-5 (−986); chr5:172671163-172671245/NKX2-5 (−8889), STC2 (+85302); chr5:172671482-172671639/
NKX2-5 (−9246), STC2 (+84945); chr5:172672893-172672960/NKX2-5 (−10612), STC2 (+83579); chr5:1727549
63-172754985/NKX2-5 (−92659), STC2 (+1532); chr5:172755378-172755420/NKX2-5 (−93084), STC2 (+1107);
chr5:172755563-172755594/STC2 (+927); chr5:173738744-173738806/MSX2 (−412800), HMP19 (+266051); ch
r5:174035992-174036062/MSX2 (−115548), HMP19 (+563303); chr5:174148765-174148842/MSX2 (−2771); chr
5:174154369-174154455/MSX2 (+2837), DRD1 (+716751); chr5:174158688-174159006/MSX2 (+7272), DRD1
(+712316); chr5:174220817-174220856/MSX2 (+69262), DRD1 (+650326); chr5:175085315-175085524/HRH2
(+380); chr5:175223748-175223835/CPLX2 (−74709), HRH2 (+138752); chr5:175224329-175224347/CPLX2
(−74163), HRH2 (+139298); chr5:175300171-175300216/CPLX2 (+1693), THOC3 (+95351); chr5:175560220-175
560258/THOC3 (−164694), KIAA1191 (+228570); chr5:175792932-175792997/KIAA1191 (−4156), ARL10 (+463);
chr5:175815442-175815514/HIGD2A (−306), NOP16 (+62); chr5:175964851-175964918/RNF44 (−464); chr5:
176024477-176024491/GPRIN1 (+12647), CDHR2 (+48141); chr5:176047319-176047328/GPRIN1 (−10193), S
NCB (+10233); chr5:176107485-176107517/UNC5A (−130059), TSPAN17 (+33113); chr5:176170621-17617070
3/UNC5A (−66898), TSPAN17 (+96274); chr5:176236998-176237148/UNC5A (−487); chr5:176238303-1762383
52/UNC5A (+768); chr5:176543900-176544052/NSD1 (−16857), FGFR4 (+30055); chr5:176778671-176778715/
LMAN2 (+192); chr5:176784964-176785051/RGS14 (+164); chr5:176789472-176789547/SLC34A1 (−21922), R
GS14 (+4666); chr5:176830142-176830181/PFN3 (−2525); chr5:176883428-176883493/PRR7 (+8135), DBN1
(+17233); chr5:176924664-176924681/PDLIM7 (−71); chr5:176935237-176935308/PDLIM7 (−10671), DOK3 (+1
585); chr5:176981390-176981461/TMED9 (−37787), DDX41 (−37459); chr5:177209928-177210044/LOC728554
(−92276), B4GALT7 (+182867); chr5:177210319-177210406/LOC728554 (−91899), B4GALT7 (+183244); chr5:
177366994-177367067/PROP1 (+56212), LOC728554 (+64769); chr5:177411422-177411507/PROP1 (+11778),
LOC728554 (+109203); chr5:177434404-177434456/N4BP3 (−106126), PROP1 (−11187); chr5:177541222-17
7541299/N4BP3 (+705); chr5:177667803-177667864/AGXT2L2 (−8031), COL23A1 (+349722); chr5:177988918-
177988987/AGXT2L2 (−329150), COL23A1 (+28603); chr5:178003662-178003915/AGXT2L2 (−343986), COL2
3A1 (+13767); chr5:178004058-178004285/AGXT2L2 (−344369), COL23A1 (+13384); chr5:178004398-178004
470/AGXT2L2 (−344631), COL23A1 (+13122); chr5:178016571-178016681/COL23A1 (+930); chr5:178017007-
178017519/COL23A1 (+293); chr5:178054158-178054178/CLK4 (−114); chr5:178323139-178323183/ZFP2 (+2
45); chr5:178368122-178368414/ZNF454 (+74); chr5:178420360-178420535/GRM6 (+1676), ZNF454 (+52254);
chr5:178421423-178421676/GRM6 (+574); chr5:178421818-178422014/GRM6 (+208); chr5:178450357-1784
50406/ZNF879 (−394); chr5:178487304-178487341/ZNF354C (−284); chr5:178594053-178594123/ZNF354C
(+106481), ADAMTS2 (+178343); chr5:178770905-178771198/ADAMTS2 (+1379), ZNF354C (+283445); chr5:17
8771631-178771723/ADAMTS2 (+754); chr5:178771860-178771967/ADAMTS2 (+517); chr5:178772730-17877
2778/ADAMTS2 (−323); chr5:178957227-178957273/ADAMTS2 (−184819), RUFY1 (−20321); chr5:178957433-1
78957470/ADAMTS2 (−185021), RUFY1 (−20119); chr5:179050252-179050286/HNRNPH1 (+453); chr5:179105
251-179105316/C5orf60 (−33237), CANX (−20646); chr5:179194241-179194315/LTC4S (−26708), MAML1 (+344
27); chr5:179199279-179199406/LTC4S (−21643), MAML1 (+39492); chr5:179223753-179223813/LTC4S (+279
7), MGAT4B (+10169); chr5:179233398-179233418/MGAT4B (+544); chr5:179243754-179243798/SQSTM1 (−4
066); chr5:179285574-179285622/C5orf45 (+242); chr5:179507555-179507640/RNF130 (−8489), RASGEF1C
(+128532); chr5:179635290-179635359/RASGEF1C (+805); chr5:179635601-179635648/RASGEF1C (+505); c
hr5:179636155-179636200/RASGEF1C (−48); chr5:179779783-179779840/GFPT2 (+503); chr5:179780013-17
9780035/GFPT2 (+291); chr5:180018217-180018262/SCGB3A1 (+247); chr5:180018449-180018483/SCGB3A
1 (+21); chr5:180072441-180072533/SCGB3A1 (−54000), FLT4 (+4137); chr5:180075858-180076053/FLT4 (+6
68); chr5:180076458-180076532/FLT4 (+129); chr5:180100557-180100616/FLT4 (−23963), OR2Y1 (+66471); c
hr5:180100874-180101015/FLT4 (−24321), OR2Y1 (+66113); chr5:180101168-180101251/FLT4 (−24586), OR2
Y1 (+65848); chr5:180229397-180229432/MGAT1 (+633); chr5:180230630-180230689/MGAT1 (−612); chr5:18
0237221-180237257/MGAT1 (−7191), ZFP62 (+51047); chr5:180238052-180238091/MGAT1 (−8024), ZFP62
(+50214); chr5:180486329-180486371/OR2V2 (−95593), BTNL9 (+19125); chr5:180486557-180486582/OR2V2
(−95373), BTNL9 (+19345); chr5:180486782-180486864/OR2V2 (−95120), BTNL9 (+19598); chr5:180511971-180
512015/OR2V2 (−69950), BTNL9 (+44768); chr5:180524093-180524130/OR2V2 (−57831), BTNL9 (+56887); chr
5:180524258-180524395/OR2V2 (−57616), BTNL9 (+57102); chr5:180524885-180525021/OR2V2 (−56990), BT
NL9 (+57728); chr5:180527699-180527793/OR2V2 (−54197), BTNL9 (+60521); chr5:180528371-180528426/O
R2V2 (−53544), BTNL9 (+61174); chr5:180528698-180528764/OR2V2 (−53212), BTNL9 (+61506); chr5:180529
095-180529134/OR2V2 (−52828), BTNL9 (+61890); chr5:180529258-1 80529284/OR2V2 (−52672), BTNL9 (+62
046); chr5:180591785-180591827/OR2V2 (+9863), TRIM7 (+40371); chr5:180597041-180597086/OR2V2 (+15
121), TRIM7 (+35113); chr5:180597641-180597675/OR2V2 (+15715), TRIM7 (+34519); chr5:180610212-18061
0299/TRIM7 (+21921), OR2V2 (+28313); chr5:180687447-180687609/TRIM52 (+591); chr6:219979-220021/DU
SP22 (−72101); chr6:379488-379585/IRF4 (−12202), DUSP22 (+87436); chr6:391985-392152/IRF4 (+330); chr6:
392258-392322/IRF4 (+551); chr6:392434-392587/IRF4 (+772); chr6:393473-393764/IRF4 (+1880), EXOC2
(+299490); chr6:692866-692886/EXOC2 (+233); chr6:1312319-1312342/FOXQ1 (−344); chr6:1326832-1326894/F
OXF2 (−63206), FOXQ1 (+14188); chr6:1377724-1377748/FOXF2 (−12333), FOXQ1 (+65061); chr6:1378657-1
378687/FOXF2 (−11397), FOXQ1 (+65997); chr6:1378881-1379267/FOXF2 (−10995), FOXQ1 (+66399); chr6:1
383727-1383840/FOXF2 (−6285), FOXQ1 (+71109); chr6:1384180-1384625/FOXF2 (−5666), FOXQ1 (+71728);
chr6:1388493-1388556/FOXF2 (−1544); chr6:1389275-1389372/FOXF2 (−745); chr6:1390406-1390423/FOXF2
(+346); chr6:1390759-1390955/FOXF2 (+788); chr6:1393113-1393171/FOXC1 (−217539), FOXF2 (+3073); chr6:
1393384-1393442/FOXC1 (−217268), FOXF2 (+3344); chr6:1393757-1393933/FOXC1 (−216836), FOXF2 (+37
76); chr6:1394168-1394248/FOXC1 (−216473), FOXF2 (+4139); chr6:1601899-1601966/FOXC1 (−8748), FOXF
2 (+211864); chr6:1608666-1608731/FOXC1 (−1982); chr6:1612196-1612300/FOXC1 (+1567), GMDS (+63362
0); chr6:1614200-1614286/FOXC1 (+3562), GMDS (+631625); chr6:1614512-1614564/FOXC1 (+3857), GMDS
(+631330); chr6:1614713-1614933/FOXC1 (+4142), GMDS (+631045); chr6:1615082-1615242/FOXC1 (+4481),
GMDS (+630706); chr6:1615584-1615618/FOXC1 (+4920), GMDS (+630267); chr6:1620104-1620375/FOXC1
(+9559), GMDS (+625628); chr6:1624602-1624812/FOXC1 (+14026), GMDS (+621161); chr6:1904799-19048
83/FOXC1 (+294160), GMDS (+341027); chr6:3428120-3428214/TUBB2B (−200199), SLC22A23 (+28626); chr
6:4021554-4021569/PRPF4B (−7); chr6:4079168-4079225/C6orf201 (−243); chr6:5997389-5997401/NRN1 (+10
238), FARS2 (+735811); chr6:5999183-5999238/NRN1 (+8422), FARS2 (+737627); chr6:5999543-5999609/NR
N1 (+8057), FARS2 (+737992); chr6:6000139-6000350/NRN1 (+7388), FARS2 (+738661); chr6:6002420-6002
542/NRN1 (+5152), FARS2 (+740897); chr6:6003529-6003748/NRN1 (+3994), FARS2 (+742055); chr6:600389
6-6004114/NRN1 (+3628), FARS2 (+742421); chr6:6004239-6004336/NRN1 (+3345), FARS2 (+742704); chr6:
6004744-6004836/NRN1 (+2843), FARS2 (+743206); chr6:7051838-7051873/RREB1 (−56230), LY86 (+462922);
chr6:7141483-7141496/RREB1 (+33404), SSR1 (+172051); chr6:7727769-7728086/BMP6 (+917); chr6:7910
430-7910493/TXNDC5 (+585); chr6:8102675-8102745/EEF1E1 (+118); chr6:9399236-9399347/SLC35B3 (−963
498), OFCC1 (+540290); chr6:10113589-10113619/OFCC1 (−174022), TFAP2A (+301866); chr6:10381593-103
81694/OFCC1 (−442062), TFAP2A (+33826); chr6:10382116-10382284/OFCC1 (−442618), TFAP2A (+33270); c
hr6:10391216-10391324/OFCC1 (−451688), TFAP2A (+24200); chr6:10398493-10398527/OFCC1 (−458928), T
FAP2A (+16960); chr6:10404644-10404725/OFCC1 (−465103), TFAP2A (+10785); chr6:10410133-10410242/O
FCC1 (−470606), TFAP2A (+5282); chr6:10416399-10416507/TFAP2A (−983); chr6:10417530-10417835/TFAP2
A (−2213); chr6:10419440-10419476/TFAP2A (−3988); chr6:10420002-10420118/TFAP2A (−4590); chr6:104207
55-10420876/GCNT2 (−165177), TFAP2A (−5346); chr6:10421452-10421548/GCNT2 (−164493), TFAP2A (−603
0); chr6:10425478-10425629/GCNT2 (−160439), TFAP2A (−10084); chr6:10425790-10425838/GCNT2 (−160179),
TFAP2A (−10344); chr6:10720281-10720350/TMEM14C (−2832); chr6:10883023-10883114/SYCP2L (−3995),
GCM2 (−971); chr6:10883854-10883894/SYCP2L (−3190), GCM2 (−1776); chr6:11537705-11537732/TMEM170
B (−792); chr6:11538272-11538299/TMEM170B (−225); chr6:12749952-12750238/PHACTR1 (+33058), TBC1D
7 (+578692); chr6:13486569-13486607/TBC1D7 (−157801), GFOD1 (+1281); chr6:13814040-13814103/CCDC9
0A (+720); chr6:13860385-13860449/RNF182 (−65007), CCDC90A (−45625); chr6:15248710-15248748/JARID2
(+2202), DTNBP1 (+414560); chr6:16238832-16238860/GMPR (+35); chr6:17016422-17016470/RBM24 (−265
363), ATXN1 (−254725); chr6:17280852-17281118/RBM24 (−824); chr6:17393793-17393824/CAP2 (+73); chr6:
17580941-17581172/FAM8A1 (−19461), CAP2 (+187321); chr6:17600428-17600456/FAM8A1 (−76); chr6:18263
392-18263459/DEK (+1373), KDM1B (+107807); chr6:18277961-18277979/RNF144B (−109611), DEK (−13171);
chr6:19691997-19692142/ID4 (−145547); chr6:19837205-19837269/ID4 (−380); chr6:19837497-19837520/ID4
(−108); chr6:19837943-19837983/ID4 (+346); chr6:20024140-20024215/ID4 (+186561), MBOAT1 (+188492); chr
6:20024446-20024514/ID4 (+186863), MBOAT1 (+188190); chr6:20320030-20320135/MBOAT1 (−107413), E2F
3 (−82054); chr6:24646568-24646614/KIAA0319 (−208); chr6:24936033-24936143/FAM65B (−24893), CMAHP
(+201963); chr6:26020713-26020763/HIST1H1A (−2698), HIST1H4A (−1169), HIST1H3A (+20); chr6:26124617-2
6124642/HIST1H2BC (−498), HIST1H2AC (+257); chr6:26158694-26158729/HIST1H2BD (+363); chr6:2617217
0-26172268/HIST1H2BE (−11805), HIST1H2BD (+13870); chr6:26200075-26200097/HIST1H4E (−4787), HIST1
H3D (−622), HIST1H2AD (−615), HIST1H2BF (+299); chr6:26252099-26252140/HIST1H4G (−4915), HIST1H3F
(−1285), HIST1H2BH (+241); chr6:26273419-26273514/HIST1H3G (−1855), HIST1H2BI (+263); chr6:26501841-2
6501949/BTN1A1 (+437); chr6:26551059-26551083/ABT1 (−46100), HMGN4 (+12499); chr6:26597313-265973
73/ABT1 (+172); chr6:26689803-26689987/ZNF322 (−29915), HIST1H2BJ (+410680); chr6:26721194-2672124
2/ZNF322 (−61238), HIST1H2BJ (+379357); chr6:26722893-26722920/ZNF322 (−62927), HIST1H2BJ (+377668);
chr6:26723048-26723121/ZNF322 (−63105), HIST1H2BJ (+377490); chr6:26730752-26730785/ZNF322 (−707
89), HIST1H2BJ (+369806); chr6:26735118-26735203/ZNF322 (−75181), HIST1H2BJ (+365414); chr6:2675228
3-26752330/ZNF322 (−92327), HIST1H2BJ (+348268); chr6:26757530-26757579/ZNF322 (−97575), HIST1H2B
J (+343020); chr6:26766812-26766870/ZNF322 (−106861), HIST1H2BJ (+333734); chr6:26767395-26767461/Z
NF322 (−107448), HIST1H2BJ (+333147); chr6:26771302-26771344/ZNF322 (−111343), HIST1H2BJ (+329252);
chr6:26779091-26779318/ZNF322 (−119225), HIST1H2BJ (+321370); chr6:26780132-26780223/ZNF322 (−12
0198), HIST1H2BJ (+320397); chr6:26780497-26780565/ZNF322 (−120551), HIST1H2BJ (+320044); chr6:2678
0870-26780898/ZNF322 (−120904), HIST1H2BJ (+319691); chr6:27095050-27095107/ZNF322 (−435099), HIST
1H2BJ (+5496); chr6:27114417-27114459/HIST1H2AH (−470), HIST1H2BK (+199); chr6:27173547-27173632/P
RSS16 (−41912), HIST1H2AH (+58682); chr6:27203337-27203363/PRSS16 (−12152), HIST1H2AH (+88442); ch
r6:27205837-27205913/PRSS16 (−9627), HIST1H2AH (+90967); chr6:27228187-27228289/FKSG83 (−64302),
PRSS16 (+12736); chr6:27251509-27251857/FKSG83 (−40857), PRSS16 (+36181); chr6:27263314-27263398/
FKSG83 (−29184), PRSS16 (+47854); chr6:27463910-27463960/ZNF184 (−23038), HIST1H2BL (+311774); chr
6:27512884-27512994/ZNF184 (−72042), HIST1H2BL (+262770); chr6:27647736-27647890/ZNF184 (−206916),
HIST1H2BL (+127896); chr6:27782252-27782334/HIST1H2BM (−529), HIST1H2AJ (+225); chr6:27783053-277
83114/HIST1H2AJ (−566), HIST1H2BM (+262); chr6:27805907-27805936/HIST1H2BN (−518), HIST1H2AK (+19
5); chr6:27834863-27834904/HIST1H1B (+475); chr6:27835097-27835377/HIST1H1B (+122); chr6:28219650-2
8219698/ZKSCAN4 (+328); chr6:28351122-28351182/ZSCAN12 (+16392), ZKSCAN3 (+33461); chr6:2836734
7-28367490/ZSCAN12 (+125); chr6:28411088-28411151/ZSCAN23 (+159); chr6:28414992-28415091/ZSCAN2
3 (−3763); chr6:28521795-28521836/GPX5 (+28027), SCAND3 (+33296); chr6:28557813-28557842/SCAND3
(−2716); chr6:28583970-28584268/SCAND3 (−29007), TRIM27 (+307649); chr6:28603170-28603274/SCAND3
(−48110), TRIM27 (+288546); chr6:28603662-28603720/SCAND3 (−48579), TRIM27 (+288077); chr6:28741335-2
8741425/SCAND3 (−186268), TRIM27 (+150388); chr6:28743595-28743613/SCAND3 (−188492), TRIM27 (+148
164); chr6:28743745-28743777/SCAND3 (−188649), TRIM27 (+148007); chr6:28747873-28747931/SCAND3
(−192790), TRIM27 (+143866); chr6:28945154-28945232/TRIM27 (−53425), ZNF311 (+27842); chr6:28945445-28
945479/TRIM27 (−53694), ZNF311 (+27573); chr6:28956512-28956659/TRIM27 (−64818), ZNF311 (+16449); ch
r6:29521012-29521075/MAS1L (−65365), UBD (+6658); chr6:29521536-29521687/MAS1L (−65933), UBD (+609
0); chr6:29691244-29691311/HLA-F (+161); chr6:29717135-29717187/LOC554223 (−42522), HLA-F (+26044);
chr6:29759980-29760109/LOC554223 (+362); chr6:29760264-29760328/LOC554223 (+613); chr6:29795870-2
9796067/HLA-A (−114278), HLA-G (+1213); chr6:29796190-29796238/HLA-A (−114033), HLA-G (+1458); chr6:2
9855705-29855774/HLA-A (−54507), HLA-G (+60984); chr6:29855913-29855969/HLA-A (−54306), HLA-G (+611
85); chr6:29894390-29894533/HLA-A (−15785), HLA-G (+99706); chr6:29894907-29894945/HLA-A (−15321), H
LA-G (+100170); chr6:29910993-29911035/HLA-A (+767); chr6:29911294-29911317/HLA-J (−62911), HLA-A
(+1059); chr6:29974344-29974511/HLA-J (+211); chr6:29974862-29974899/HLA-J (+664); chr6:30028942-30028
990/ZNRD1 (−70); chr6:30039201-30039277/PPP1R11 (+4307), RNF39 (+4389); chr6:30071174-30071231/RN
F39 (−27575), TRIM31 (+9664); chr6:30095581-30095705/TRIM31 (−14776), TRIM40 (−8867); chr6:30139870-3
0140135/TRIM10 (−11292), TRIM26 (+41268); chr6:30294904-30295069/TRIM39-RPP21 (−2101); chr6:304195
69-30419594/HLA-E (−37601), TRIM39-RPP21 (+122494); chr6:30420894-30421036/HLA-E (−36218), TRIM39-
RPP21 (+123877); chr6:30431788-30431824/HLA-E (−25377), TRIM39-RPP21 (+134718); chr6:30432081-3043
2151/HLA-E (−25067), TRIM39-RPP21 (+135028); chr6:30457970-30458007/HLA-E (+806); chr6:30538789-305
38835/ABCF1 (−358); chr6:30585007-30585030/MRPS18B (−467), PPP1R10 (+1); chr6:30653700-30653727/D
HX16 (−12884), PPP1R18 (+1379); chr6:30654509-30654538/PPP1R18 (+569); chr6:30655248-30655288/PPP
1R18 (−175); chr6:30689389-30689433/MDC1 (−3953), TUBB (+1254); chr6:30698783-30698904/TUBB (+1068
7), FLOT1 (+11609); chr6:30876071-30876136/GTF2H4 (+127); chr6:30882630-30882707/VARS2 (+561); chr6:
31125929-31125949/CCHCR1 (−373), TCF19 (−364); chr6:31239023-31239062/HLA-C (+870); chr6:31466100-
31466118/MICB (+254); chr6:31509858-31509890/DDX39B (+378); chr6:31525860-31525914/LTA (−13989), N
FKBIL1 (+10534); chr6:31783321-31783481/HSPA1L (−566), HSPA1A (+110); chr6:31795391-31795435/HSPA
1B (−99); chr6:31795740-31795753/HSPA1B (+235); chr6:31870063-31870083/EHMT2 (−4609), ZBTB12 (−304);
chr6:31939844-31939892/DOM3Z (+164), STK19 (+222); chr6:32055369-32055449/TNXB (+21742), CYP21A2
(+49316); chr6:32064371-32064488/TNXB (+12721), CYP21A2 (+58337); chr6:32064638-32064659/TNXB (+1
2502), CYP21A2 (+58556); chr6:32116779-32116857/PPT2 (−4411), PRRT1 (+2902); chr6:32116982-32117028/
PPT2 (−4224), PRRT1 (+2715); chr6:32632741-32632756/HLA-DQB1 (+1717), HLA-DQA1 (+22252); chr6:328
12363-32812458/PSMB8 (−595); chr6:32813440-32813581/PSMB8 (−1695); chr6:32862251-32862318/PSMB9
(+40347), HLA-DMB (+46562); chr6:33085259-33085325/HLA-DPB1 (+41589), COL11A2 (+74953); chr6:33239
847-33239880/VPS52 (−202), RPS18 (+12); chr6:33245914-33245989/B3GALT4 (+1035), WDR46 (+11352); ch
r6:33256964-33257017/PFDN6 (−387), WDR46 (+313); chr6:33267098-33267177/RGL2 (+27); chr6:33290887-
33290933/DAXX (−117); chr6:33679641-33679699/C6orf125 (−166); chr6:33714040-33714120/IP6K3 (+682); ch
r6:34203174-34203203/HMGA1 (−1461); chr6:34203686-34203750/HMGA1 (−932); chr6:34206133-34206174/H
MGA1 (+1504), C6orf1 (+10750); chr6:34360080-34360099/C6orf1 (−143186), RPS10-NUDT3 (+33812); chr6:3
4664072-34664096/C6orf106 (+541); chr6:34664350-34664389/C6orf106 (+255); chr6:35109013-35109085/TC
P11 (+138); chr6:35480045-35480091/TULP1 (+579); chr6:35699486-35699554/FKBP5 (−42801), ARMC12 (−5
339); chr6:35992248-35992355/MAPK14 (−3152), SLC26A8 (+3); chr6:36098533-36098619/MAPK13 (+314); ch
r6:36332706-36332853/ETV7 (+22797), PNPLA1 (+94543); chr6:36355989-36356014/ETV7 (−425); chr6:36391
327-36391390/ETV7 (−35782), KCTD20 (−19185); chr6:36628590-36628769/CDKN1A (−15557), SRSF3 (+6659
0); chr6:36737478-36737591/CPNE5 (+69685), CDKN1A (+93298); chr6:36930543-36930689/PI16 (+8407), M
TCH1 (+23333); chr6:36953611-36953670/MTCH1 (+308); chr6:36954245-36954286/MTCH1 (−317); chr6:3740
1307-37401333/FTSJD2 (+413); chr6:37467672-37467695/CCDC167 (+16); chr6:37504375-37504401/CCDC1
67 (−36688), MDGA1 (+161378); chr6:37616757-37616960/CCDC167 (−149159), MDGA1 (+48907); chr6:37664
459-37664481/CCDC167 (−196770), MDGA1 (+1296); chr6:37666844-37666866/MDGA1 (−1089); chr6:386828
43-38682906/DNAH8 (−242); chr6:38683141-38683211/DNAH8 (+59); chr6:39016325-39016390/GLP1R (−199);
chr6:39016630-39016678/GLP1R (+97); chr6:39016952-39017039/GLP1R (+439); chr6:39082382-39082452/S
AYSD1 (+448); chr6:40995826-40995898/LRFN2 (−440736), UNC5CL (+11076); chr6:41040200-41040300/NFY
A (−457), C6orf130 (−62); chr6:41336735-41336764/FOXP4 (−177414), NCR2 (+33222); chr6:41339559-413396
01/FOXP4 (−174584), NCR2 (+36052); chr6:41341604-41341760/FOXP4 (−172482), NCR2 (+38154); chr6:4147
1078-41471168/FOXP4 (−43041), NCR2 (+167595); chr6:41513312-41513366/FOXP4 (−825); chr6:41515584-4
1515777/MDFI (−90514), FOXP4 (+1517); chr6:41515897-41516279/MDFI (−90107), FOXP4 (+1924); chr6:4152
8306-41528355/MDFI (−77864), FOXP4 (+14167); chr6:41605344-41605439/MDFI (−803); chr6:41605952-4160
6037/MDFI (−200); chr6:41606357-41606527/MDFI (+247); chr6:41607089-41607176/MDFI (+938); chr6:41750
287-41750364/TOMM6 (−4174), FRS3 (−2696); chr6:41863546-41863606/USP49 (−477); chr6:42072051-42072
090/GUCA1A (−51073), TAF8 (+53820); chr6:42072402-42072484/GUCA1A (−50701), TAF8 (+54192); chr6:421
45905-42145975/GUCA1B (+16754), GUCA1A (+22796); chr6:42335129-42335230/MRPS10 (−149547), TRER
F1 (+84603); chr6:42397115-42397190/MRPS10 (−211520), TRERF1 (+22630); chr6:42531868-42531901/UBR
2 (+125); chr6:42694917-42694994/PRPH2 (−4598); chr6:42695143-42695198/PRPH2 (−4813); chr6:42879569-
42879621/PTCRA (−4132); chr6:43027554-43027577/MRPL2 (−324), KLC4 (−63); chr6:43043964-43044000/PT
K7 (−47); chr6:43211462-43211478/TTBK1 (+248); chr6:43244032-43244096/SLC22A7 (−21934), TTBK1 (+328
42); chr6:43252833-43252887/SLC22A7 (−13138), TTBK1 (+41638); chr6:43478020-43478058/YIPF3 (+6689),
TJAP1 (+32778); chr6:43612899-43613052/RSPH9 (+209); chr6:43855215-43855325/VEGFA (+117324), MRP
L14 (+239921); chr6:43970849-43970953/MRPL14 (+124290), VEGFA (+232955); chr6:44095055-44095109/T
MEM63B (−294), MRPL14 (+109); chr6:44187075-44187131/SLC29A1 (−4193); chr6:44205645-44205700/HSP9
0AB1 (−9176), SLC29A1 (+14377); chr6:44205836-44205876/HSP90AB1 (−8993), SLC29A1 (+14560); chr6:442
24923-44224958/SLC35B2 (+342); chr6:44244012-44244119/TMEM151B (+5586), AARS2 (+36997); chr6:443
10390-44310508/CDC5L (−44802), AARS2 (−29386); chr6:44528957-44529119/RUNX2 (−767016), CDC5L (+17
3787); chr6:45390316-45390346/SUPT3H (−44661), CLIC5 (+657754); chr6:45391881-45391990/SUPT3H (−46
266), CLIC5 (+656149); chr6:45631136-45631602/SUPT3H (−285699), CLIC5 (+416716); chr6:46097622-46097
694/ENPP4 (−43); chr6:47445441-47445477/CD2AP (−66); chr6:48036583-48036619/C6orf138 (−176); chr6:506
76232-50676330/TFAP2D (−4976); chr6:50682339-50682448/TFAP2B (−104045), TFAP2D (+1137); chr6:50682
684-50682711/TFAP2B (−103741), TFAP2D (+1441); chr6:50682941-50682991/TFAP2B (−103473), TFAP2D
(+1709); chr6:50692213-50692299/TFAP2B (−94183), TFAP2D (+10999); chr6:50787877-50787949/TFAP2B (+1
474); chr6:50791495-50791550/TFAP2B (+5084); chr6:50810714-50810936/TFAP2B (+24386); chr6:50818185-
50818348/TFAP2B (+31828); chr6:53409520-53409552/GCLC (+391); chr6:53660874-53660908/MLIP (−3153
54), LRRC1 (+1357); chr6:54711492-54711546/HCRTR2 (−327552), TINAG (+538316); chr6:55039231-550393
63/HCRTR2 (+226); chr6:56716300-56716389/DST (−208651), KIAA1586 (−195039); chr6:56954778-56954813/
ZNF451 (−32); chr6:58141836-58141898/PRIM2 (+959445); chr6:58142246-58142289/PRIM2 (+959846); chr6:
58147511-58147739/PRIM2 (+965203); chr6:58148434-58148644/PRIM2 (+966117); chr6:58149247-58149292/
PRIM2 (+966848); chr6:58180257-58180441/PRIM2 (+997927); chr6:62995875-62996077/KHDRBS2 (+124); c
hr6:70992049-70992136/COL9A1 (+20693), COL19A1 (+415645); chr6:71123704-71123746/C6orf57 (−152900),
COL9A1 (−110939); chr6:71666681-71666698/B3GAT2 (+98); chr6:72129850-72129926/RIMS1 (−466762), O
GFRL1 (+131411); chr6:72130045-72130190/RIMS1 (−466532), OGFRL1 (+131641); chr6:72130499-72130646/
RIMS1 (−466077), OGFRL1 (+132096); chr6:73331851-73331875/KCNQ5 (+292); chr6:73839714-73839781/K
HDC1 (+133159), KCNQ5 (+508177); chr6:74024483-74024515/KHDC1 (−51592), DPPA5 (+39500); chr6:7416
1192-74161232/MB21D1 (+831); chr6:74161499-74161684/MB21D1 (+451); chr6:74161798-74161830/MB21D
1 (+229); chr6:74405392-74405407/CD109 (−108); chr6:75911708-75911834/COL12A1 (+3852); chr6:7591470
5-75914738/COL12A1 (+901); chr6:75915121-75915170/COL12A1 (+477); chr6:75915384-75915426/COL12A
1 (+218); chr6:75917462-75917532/COL12A1 (−1874); chr6:75953516-75953638/COX7A2 (+67); chr6:7599377
3-75993870/TMEM30A (+810); chr6:78172276-78172322/HTR1B (+821); chr6:78173726-78173771/HTR1B (−6
29); chr6:78359940-78360072/HTR1B (−186886); chr6:79620877-79620907/IRAK1BP1 (+43703), PHIP (+1671
19); chr6:79786979-79787024/PHIP (+1009), IRAK1BP1 (+209813); chr6:79944328-79944379/HMGN3 (+101);
chr6:80246851-80246889/LCA5 (+277); chr6:80341024-80341054/SH3BGRL2 (+39); chr6:82461689-82461728/
IBTK (+495739); chr6:84417701-84417908/SNAP91 (+1042), PRSS35 (+195611); chr6:84418064-84418260/S
NAP91 (+685); chr6:84418888-84418915/SNAP91 (−55); chr6:84563285-84563416/RIPPLY2 (+366); chr6:8548
3167-85483210/NT5E (−676113), TBX18 (−9290); chr6:85483524-85483759/NT5E (−675660), TBX18 (−9743); c
hr6:85484111-85484298/NT5E (−675097), TBX18 (−10306); chr6:85484626-85484716/NT5E (−674631), TBX18
(−10772); chr6:86352947-86352992/SYNCRIP (+73); chr6:87647309-87647316/HTR1E (+289); chr6:87865161-
87865215/ZNF292 (−81); chr6:88182368-88182441/SLC35A1 (−238); chr6:88875568-88875621/CNR1 (+172); c
hr6:88876238-88876284/CNR1 (−494); chr6:88876549-88876572/CNR1 (−794); chr6:88877422-88877474/CNR
1 (−1681); chr6:89673535-89673565/RNGTT (−202); chr6:89827935-89827990/SRSF12 (−163); chr6:91005179-
91005208/BACH2 (+1433), GJA10 (+401006); chr6:91005631-91005660/BACH2 (+981); chr6:91006753-91006
779/BACH2 (−139); chr6:94126291-94126366/EPHA7 (+2971); chr6:94126613-94126642/EPHA7 (+2672); chr6:
94127066-94127085/EPHA7 (+2224); chr6:97284935-97284998/GPR63 (+386); chr6:99281037-99281067/PO
U3F2 (−1528); chr6:99290473-99290709/POU3F2 (+8011), FBXL4 (+105258); chr6:99291342-99291586/POU3
F2 (+8884), FBXL4 (+104385); chr6:99291697-99291729/POU3F2 (+9133), FBXL4 (+104136); chr6:99295864-
99296061/POU3F2 (+13383), FBXL4 (+99886); chr6:99296365-99296407/POU3F2 (+13806), FBXL4 (+99463);
chr6:100038707-100038785/CCNC (−22056), PRDM13 (−15904); chr6:100039154-100039274/CCNC (−22524),
PRDM13 (−15436); chr6:100050462-100050505/PRDM13 (−4166); chr6:100050811-100050858/PRDM13 (−3815);
chr6:100051112-100051359/PRDM13 (−3414); chr6:100051508-100051771/PRDM13 (−3010); chr6:10005523
2-100055269/PRDM13 (+601); chr6:100067019-100067144/PRDM13 (+12432), MCHR2 (+375032); chr6:10044
1308-100441497/MCHR2 (+711); chr6:100441738-100441761/MCHR2 (+364); chr6:100895637-100895834/MC
HR2 (−453622), SIM1 (+16075); chr6:100897261-100897520/MCHR2 (−455277), SIM1 (+14420); chr6:1009016
17-100901711/MCHR2 (−459550), SIM1 (+10147); chr6:100903405-100903560/MCHR2 (−461369), SIM1 (+832
8); chr6:100903781-100903832/MCHR2 (−461693), SIM1 (+8004); chr6:100906167-100906245/MCHR2 (−4640
92), SIM1 (+5605); chr6:100912446-100912465/SIM1 (−645); chr6:100913051-100913266/SIM1 (−1348); chr6:1
00917310-100917457/SIM1 (−5573), ASCC3 (+411840); chr6:101846790-101846865/GRIK2 (−33); chr6:101850
629-101850725/GRIK2 (+3816); chr6:105388321-105388399/HACE1 (−80566), LIN28B (−16563); chr6:1053887
17-105389493/HACE1 (−81311), LIN28B (−15818); chr6:105584320-105584366/BVES (+200); chr6:106429476-
106429589/PREP (−578534), PRDM1 (−104662); chr6:106434068-106434152/PREP (−583111), PRDM1 (−1000
85); chr6:107436198-107436232/C6orf203 (+86808), PDSS2 (+344564); chr6:107955552-107955819/SOBP
(+144369), SCML4 (+189835); chr6:107955952-107956396/SOBP (+144857), SCML4 (+189347); chr6:10843815
7-108438260/NR2E1 (−49006), OSTM1 (−42268); chr6:108440645-108440744/NR2E1 (−46520), OSTM1 (−4475
4); chr6:108487006-108487077/NR2E1 (−173); chr6:108488598-108488821/NR2E1 (+1495), SNX3 (+93754); c
hr6:108489279-108489661/NR2E1 (+2255), SNX3 (+92994); chr6:108489976-108490034/NR2E1 (+2790), SN
X3 (+92459); chr6:108490246-108490296/NR2E1 (+3056), SNX3 (+92193); chr6:108490515-108490537/NR2E
1 (+3311), SNX3 (+91938); chr6:108491001-108491107/NR2E1 (+3839), SNX3 (+91410); chr6:108495818-108
495915/NR2E1 (+8652), SNX3 (+86597); chr6:108497797-108497826/NR2E1 (+10597), SNX3 (+84652); chr6:
108880358-108880410/FOXO3 (−1685); chr6:108880766-108880789/FOXO3 (−1291); chr6:108882931-108882
975/FOXO3 (+884); chr6:109169765-109169810/ARMC2 (+169); chr6:109331158-109331216/SESN1 (+84521),
ARMC2 (+161568); chr6:109762478-109762527/PPIL6 (−129), SMPD2 (+572); chr6:110012408-110012443/A
KD1 (−11), FIG4 (+2); chr6:110299445-110299484/GPR6 (−833); chr6:110300307-110300364/GPR6 (+38); chr6:
110300542-110300584/GPR6 (+265); chr6:110797874-110797926/SLC22A16 (−56); chr6:111136480-1111365
93/CDK19 (−125); chr6:112364428-112364491/FYN (−323195), WISP3 (−10911); chr6:114291956-114292009/H
DAC2 (+376); chr6:116783104-116783139/FAM26F (+566); chr6:116989950-116989984/ZUFSP (+6); chr6:117
584608-117584675/VGLL2 (−2079); chr6:117586644-117586846/VGLL2 (+24); chr6:117591597-117591683/VG
LL2 (+4919), ROS1 (+155378); chr6:117804434-117804487/DCBLD1 (+641); chr6:117997192-117997256/NUS
1 (+607); chr6:118228232-118228323/SLC35F1 (−411); chr6:118229390-118229416/SLC35F1 (+714); chr6:118
229573-118229616/SLC35F1 (+906); chr6:118241309-118241394/PLN (−628090), SLC35F1 (+12663); chr6:12
1655628-121655675/C6orf170 (−8); chr6:123111136-123111186/CLVS2 (−206421), SMPDL3A (+1190); chr6:12
3317007-123317072/CLVS2 (−542); chr6:125283490-125283600/RNF217 (−20969); chr6:126068022-12606806
8/HEY2 (−2687); chr6:127439273-127439321 /RSPO3 (−751); chr6:127440963-127441030/RSPO3 (+949); chr6:
127442071-127442089/RNF146 (−145747), RSPO3 (+2032); chr6:127839821-127839929/C6orf174 (+625); chr
6:129204304-129204360/LAMA2 (+46); chr6:130341153-130341164/TMEM200A (−417103), L3MBTL3 (+1431);
chr6:130341270-130341286/TMEM200A (−416984), L3MBTL3 (+1550); chr6:130687193-130687224/TMEM200
A (−71053), L3MBTL3 (+347481); chr6:131384220-131384256/EPB41L2 (+224); chr6:132722142-132722157/M
OXD1 (+514); chr6:133562268-133562348/EYA4 (−187); chr6:133563095-133563157/EYA4 (+631); chr6:13415
9302-134159347/TCF21 (−50934), EYA4 (+596830); chr6:134176313-134176376/TCF21 (−33914), EYA4 (+613
850); chr6:134211019-134211111/TCF21 (+806); chr6:134213988-134214076/TBPL1 (−59276), TCF21 (+3773);
chr6:134495559-134495595/SLC2A12 (−121788), SGK1 (+143619); chr6:135376414-135376460/HBS1L (−401);
chr6:137244149-137244235/SLC35D3 (+790); chr6:137244466-137245086/SLC35D3 (+1374), IL20RA (+121
522); chr6:137808894-137809000/IFNGR1 (−268380), OLIG3 (+6584); chr6:137809366-137809445/IFNGR1 (−2
68839), OLIG3 (+6125); chr6:137809980-137810032/IFNGR1 (−269439), OLIG3 (+5525); chr6:137814619-1378
14653/OLIG3 (+895); chr6:137815171-137815224/OLIG3 (+333); chr6:137818599-137818618/OLIG3 (−3078); c
hr6:138482869-138482902/KIAA1244 (−167); chr6:139094495-139094532/ECT2L (−22734), HEBP2 (+369178);
chr6:142409702-142409750/NMBR (+210); chr6:143857701-143857758/PHACTR2 (−141372), FUCA2 (−24710);
chr6:144416024-144416102/SF3B5 (+691); chr6:144471890-144471924/STX11 (+253); chr6:146350409-1463
50452/RAB32 (−514397), GRM1 (+1649); chr6:146350600-146350619/RAB32 (−514218), GRM1 (+1828); chr6:
146350721-146350762/RAB32 (−514086), GRM1 (+1960); chr6:147828394-147828454/STXBP5 (+302930); chr
6:149771896-149771913/ZC3H12D (+34243), TAB2 (+132469); chr6:149772273-149772292/ZC3H12D (+3386
5), TAB2 (+132847); chr6:149803615-149803686/ZC3H12D (+2497), TAB2 (+164215); chr6:150038699-15003
8781/LATS1 (+652); chr6:150067633-150067677/PCMT1 (−3176), NUP43 (+33); chr6:150070625-150070660/N
UP43 (−2955), PCMT1 (−188); chr6:150247166-150247248/RAET1G (−2993); chr6:150262374-150262428/ULB
P2 (−735); chr6:150275488-150275554/ULBP1 (−9622), ULBP2 (+12385); chr6:150276087-150276322/ULBP1
(−8938), ULBP2 (+13069); chr6:150285369-150285544/ULBP1 (+314); chr6:150285886-150286099/ULBP1 (+85
0); chr6:150335570-150335739/RAET1L (+11013), ULBP1 (+50512); chr6:150336182-150336239/RAET1L (+1
0457), ULBP1 (+51068); chr6:150359193-150359438/RAET1L (−12648), ULBP3 (+30967); chr6:150389779-150
389820/ULBP3 (+483); chr6:151186912-151187024/MTHFD1L (+153); chr6:151561341-151561368/AKAP12
(+221); chr6:151561992-151562056/AKAP12 (+890); chr6:152002877-152002939/RMND1 (−229592), ESR1 (−125
546); chr6:152128917-152128956/ESR1 (+483); chr6:152129109-152129155/ESR1 (+678); chr6:152129604-15
2129680/ESR1 (+1188), SYNE1 (+828892); chr6:152957781-152957815/SYNE1 (+736); chr6:153452130-1534
52143/RGS17 (+252); chr6:153452755-153452788/RGS17 (−383); chr6:155316221-155316256/TIAM2 (−95184),
SCAF8 (+261727); chr6:157342583-157342629/ARID1B (+243542), TMEM242 (+402647); chr6:157342960-1
57342977/ARID1B (+243905), TMEM242 (+402284); chr6:157557297-157557711/TMEM242 (+187749), ARID1
B (+458440); chr6:157557827-157557983/TMEM242 (+187348), ARID1B (+458841); chr6:158589110-1585891
38/GTF2H5 (−255), SERAC1 (+188); chr6:158937461-158937510/TMEM181 (−19982), TULP4 (+203794); chr6:
159065777-159065792/DYNLT1 (+19); chr6:159240349-159240380/EZR (−1025); chr6:159360785-159360911/
EZR (−121508), TAGAP (+105336); chr6:159519932-159520019/FNDC1 (−70453), TAGAP (−53792); chr6:1595
90087-159590154/FNDC1 (−308); chr6:159590762-159590971/FNDC1 (+438); chr6:159595461-159595527/FN
DC1 (+5065), SOD2 (+518859); chr6:159654541-159654578/FNDC1 (+64131), SOD2 (+459793); chr6:160390
074-160390092/IGF2R (−48); chr6:160769795-160769827/SLC22A3 (+386); chr6:161100418-161100580/PLG
(−22726), LPA (−13092); chr6:161188084-161188108/MAP3K4 (−224726), PLG (+64871); chr6:161188275-16118
8410/MAP3K4 (−224479), PLG (+65118); chr6:161352146-161352198/MAP3K4 (−60650), PLG (+228947); chr6:
161352308-161352366/MAP3K4 (−60485), PLG (+229112); chr6:163148885-163149077/PARK2 (−147), PACR
G (+817); chr6:163670668-163670721/PARK2 (−521861), QKI (−164980); chr6:163756920-163756951/PARK2
(−608102), QKI (−78739); chr6:163834383-163834405/QKI (−1281); chr6:163834533-163834710/QKI (−1053); chr
6:163834902-163834987/QKI (−730); chr6:164051832-164051877/QKI (+216180); chr6:166073947-166073993/
PDE10A (+1618); chr6:166075125-166075258/PDE10A (+396); chr6:166077633-166077668/PDE10A (−2063);
chr6:166233105-166233192/PDE10A (−157561), T (+348982); chr6:166263716-166263789/PDE10A (−188165),
T (+318378); chr6:166267892-166268182/PDE10A (−192449), T (+314094); chr6:166402651-166402752/PDE1
0A (−327114), T (+179429); chr6:166582827-166582941/T (−753); chr6:166583096-166583152/T (−993); chr6:16
6666860-166666879/T (−84739), PRR18 (+55001); chr6:166667126-166667161/T (−85013), PRR18 (+54727); c
hr6:166755149-166755191/SFT2D1 (+821); chr6:166755841-166755866/SFT2D1 (+137); chr6:166756074-166
756095/SFT2D1 (−94); chr6:167369494-167369552/RNASET2 (+554); chr6:167411904-167411948/FGFR1OP
(−890); chr6:168079131-168079180/TCP10 (−281158), MLLT4 (−148515); chr6:168107202-168107248/TCP10
(−309227), MLLT4 (−120446); chr6:168197262-168197330/TCP10 (−399298), MLLT4 (−30375); chr6:168479586-1
68479630/FRMD1 (+231); chr6:168501905-168502095/FRMD1 (−22161), DACT2 (+218402); chr6:168502314-1
68502653/FRMD1 (−22645), DACT2 (+217918); chr6:168719803-168719889/DACT2 (+556); chr6:168785421-1
68785529/DACT2 (−65073), SMOC2 (−56356); chr6:168841479-168841 502/SMOC2 (−340); chr6:168843061-16
8843080/SMOC2 (+1240), THBS2 (+811066); chr6:169572678-169572759/THBS2 (+81418), SMOC2 (+730888);
chr6:169664497-169664529/C6orf120 (−437744), THBS2 (−10376); chr6:170338560-170338747/C6orf70 (+18
6933), DLL1 (+261043); chr6:170403191-170403263/DLL1 (+196470), C6orf70 (+251506); chr6:170467266-17
0467332/DLL1 (+132398), C6orf70 (+315578); chr6:170468270-170468382/DLL1 (+131371), C6orf70 (+316605);
chr6:170581038-170581095/DLL1 (+18630), C6orf70 (+429346); chr6:170598352-170598458/DLL1 (+1292),
C6orf70 (+446684); chr6:170605876-170605909/FAM120B (−9951), DLL1 (−6196); chr6:170615414-170615448/
FAM120B (−413); chr7:63841-63883/FAM20C (−129107); chr7:150020-150083/FAM20C (−42917); chr7:164217-
164302/FAM20C (−28709); chr7:329231-329271/FAM20C (+136282), PDGFA (+230230); chr7:329694-329764/
FAM20C (+136760), PDGFA (+229752); chr7:330006-330425/FAM20C (+137247), PDGFA (+229265); chr7:33
0678-330720/FAM20C (+137730), PDGFA (+228782); chr7:330828-331176/FAM20C (+138033), PDGFA (+228
479); chr7:391156-391393/PDGFA (+168206), FAM20C (+198306); chr7:391842-391887/PDGFA (+167616), F
AM20C (+198896); chr7:400554-400586/PDGFA (+158911), FAM20C (+207601); chr7:416004-416065/PDGFA
(+143446), FAM20C (+223066); chr7:492224-492270/PDGFA (+67234), FAM20C (+299278); chr7:557660-557
697/PDGFA (+1802), FAM20C (+364710); chr7:557991-558076/PDGFA (+1447), FAM20C (+365065); chr7:560
689-560731/PDGFA (−1229); chr7:630491-630560/HEATR2 (−135812), PDGFA (−71045); chr7:633046-633068/
HEATR2 (−133281), PDGFA (−73576); chr7:641090-641359/HEATR2 (−125113), PDGFA (−81744); chr7:644133-
644331/HEATR2 (−122106), PDGFA (−84751); chr7:752306-752350/PDGFA (−192847), HEATR2 (−14010); chr7:
766893-766929/PRKAR1B (+402), HEATR2 (+573); chr7:852941-853018/PRKAR1B (−85667), SUN1 (−19162);
chr7:948458-948675/GET4 (+32376), ADAP1 (+45739); chr7:949063-949138/GET4 (+32910), ADAP1 (+45205);
chr7:961746-961796/ADAP1 (+32535), GET4 (+45580); chr7:1014866-1014936/COX19 (+334); chr7:1036323-
1036365/GPR146 (−60797), CYP2W1 (+13509); chr7:1051889-1051992/GPR146 (−45200), CYP2W1 (+29106);
chr7:1067812-1067869/GPR146 (−29300), CYP2W1 (+45006); chr7:1068113-1068265/GPR146 (−28952), CYP
2W1 (+45354); chr7:1263580-1263658/ZFAND2A (−63764), UNCX (−9035); chr7:1269464-1269552/UNCX (−314
6); chr7:1273388-1273589/UNCX (+835); chr7:1274925-1275045/UNCX (+2331), MICALL2 (+224124); chr7:12
75196-1275257/UNCX (+2573), MICALL2 (+223882); chr7:1275682-1275733/UNCX (+3054), MICALL2 (+2234
01); chr7:1275917-1276291/UNCX (+3450), MICALL2 (+223005); chr7:1286111-1286444/UNCX (+13624), MIC
ALL2 (+212831); chr7:1286546-1286612/UNCX (+13925), MICALL2 (+212530); chr7:1286754-1286886/UNCX
(+14166), MICALL2 (+212289); chr7:1287371-1287431/UNCX (+14747), MICALL2 (+211708); chr7:1297126-12
97153/UNCX (+24486), MICALL2 (+201969); chr7:1362844-1362890/UNCX (+90213), MICALL2 (+136242); chr
7:1408771-1408874/MICALL2 (+90286), UNCX (+136169); chr7:1409101-1409305/MICALL2 (+89906), UNCX
(+136549); chr7:1443685-1443733/MICALL2 (+55400), UNCX (+171055); chr7:1550489-1550510/MAFK (−1986
8), INTS1 (−6482); chr7:1552820-1552940/MAFK (−17488), INTS1 (−8862); chr7:1570870-1570892/MAFK (+513);
chr7:1610195-1610219/ELFN1 (−138591), TMEM184A (−14141); chr7:1703872-1704118/TMEM184A (−10792
9), ELFN1 (−44803); chr7:1707619-1707646/TMEM184A (−111567), ELFN1 (−41165); chr7:1709562-1709617/T
MEM184A (−113524), ELFN1 (−39208); chr7:1709923-1709955/TMEM184A (−113873), ELFN1 (−38859); chr7:17
10244-1710324/TMEM184A (−114218), ELFN1 (−38514); chr7:1858976-1859004/ELFN1 (+110192), MAD1L1
(+413593); chr7:1888023-1888100/ELFN1 (+139264), MAD1L1 (+384521); chr7:1959793-1959955/ELFN1 (+211
076), MAD1L1 (+312709); chr7:2059345-2059377/MAD1L1 (+213222), ELFN1 (+310563); chr7:2059920-20599
67/MAD1L1 (+212639), ELFN1 (+311146); chr7:2272092-2272137/MAD1L1 (+468); chr7:2289037-2289150/NU
DT1 (+7237), SNX8 (+65005); chr7:2394123-2394183/EIF3B (−321); chr7:2492062-2492106/LFNG (−67395), C
HST12 (+48889); chr7:2511056-2511137/LFNG (−48382), CHST12 (+67902); chr7:2548136-2548205/LFNG (−1
1308), CHST12 (+104976); chr7:2550548-2550612/LFNG (−8899), CHST12 (+107385); chr7:2568431-2568575/
LFNG (+9024), BRAT1 (+26889); chr7:2727815-2727853/AMZ1 (+8671), GNA12 (+156125); chr7:2749637-274
9692/AMZ1 (+30502), GNA12 (+134294); chr7:2753167-2753291/AMZ1 (+34066), GNA12 (+130730); chr7:275
7284-2757339/AMZ1 (+38149), GNA12 (+126647); chr7:2757631-2757663/AMZ1 (+38484), GNA12 (+126312);
chr7:3083288-3083330/CARD11 (+200); chr7:3134519-3134538/SDK1 (−206551), CARD11 (−51020); chr7:334
1409-3341569/SDK1 (+409); chr7:4304924-4304952/FOXK1 (−416992), SDK1 (+963858); chr7:4653441-46535
19/FOXK1 (−68450); chr7:4765311-4765371/KIAA0415 (−49921), FOXK1 (+43411); chr7:4831857-4831895/KIA
A0415 (+16614), PAPOLB (+69749); chr7:4848821-4848977/KIAA0415 (+33637), PAPOLB (+52726); chr7:488
5495-4885531/PAPOLB (+16112), KIAA0415 (+70251); chr7:4923043-4923229/RADIL (+199); chr7:4998587-4
998770/MMD2 (+165); chr7:5013858-5013879/RBAK (−71684), MMD2 (−15025); chr7:5014367-5014425/RBAK
(−71157), MMD2 (−15552); chr7:5085484-5085523/RBAK (−49); chr7:5335676-5335706/SLC29A4 (+13130), TN
RC18 (+127486); chr7:5497509-5497564/TNRC18 (−34360), FBXL18 (+55862); chr7:5526590-5526634/TNRC1
8 (−63435), FBXL18 (+26787); chr7:5633919-5633968/FSCN1 (+1508), RNF216 (+187417); chr7:5938538-5938
571/CCZ1 (+214); chr7:6121016-6121080/USP42 (−23502), EIF2AK1 (−22188); chr7:6121201-6121229/USP42
(−23335), EIF2AK1 (−22355); chr7:6487341-6487366/DAGLB (+289); chr7:6566236-6566246/KDELR2 (−42392),
GRID2IP (+24826); chr7:6570863-6570900/KDELR2 (−47033), GRID2IP (+20185); chr7:6573861-6573988/KDE
LR2 (−50076), GRID2IP (+17142); chr7:6576528-6576557/KDELR2 (−52694), GRID2IP (+14524); chr7:6703870-
6703915/ZNF12 (+42673), ZNF853 (+48366); chr7:8300809-8300874/ICA1 (+840); chr7:8301371-8301429/IC
A1 (+282); chr7:8301544-8301570/ICA1 (+125); chr7:8473456-8473479/NXPH1 (−117); chr7:8474242-8474515/
NXPH1 (+794); chr7:8475440-8475556/NXPH1 (+1913); chr7:8482298-8482669/NXPH1 (+8899); chr7:8482825-
8482884/NXPH1 (+9270); chr7:12151473-12151523/THSD7A (−279674), TMEM106B (−99350); chr7:12610665-
12610726/SCIN (+493); chr7:16793342-16793380/TSPAN13 (+10); chr7:18126062-18126082/HDAC9 (−40981
3), PRPS1L1 (−58586); chr7:18126458-18126465/HDAC9 (−409423), PRPS1L1 (−58976); chr7:19145894-19146
031/TWIST1 (+11332), HDAC9 (+610078); chr7:19146185-19146237/TWIST1 (+11084), HDAC9 (+610326); chr
7:19151883-19152223/TWIST1 (+5242), HDAC9 (+616168); chr7:19156062-19156125/TWIST1 (+1201), HDAC
9 (+620209); chr7:19156247-19156281/TWIST1 (+1031), HDAC9 (+620379); chr7:19156841-19156968/TWIST
1 (+390); chr7:19157567-19157633/TWIST1 (−305); chr7:19184426-19184564/FERD3L (+549); chr7:19184885-
19184960/FERD3L (+121); chr7:19186033-19186067/FERD3L (−1006); chr7:20817957-20817982/SP8 (+8538),
ABCB5 (+162725); chr7:20818619-20818669/SP8 (+7864), ABCB5 (+163399); chr7:20823331-20823382/SP8
(+3151), ABCB5 (+168112); chr7:20823879-20823919/SP8 (+2609), ABCB5 (+168654); chr7:20824144-208244
75/SP8 (+2198), ABCB5 (+169065); chr7:20824820-20824835/SP8 (+1680), ABCB5 (+169583); chr7:20837627-
20837650/SP4 (−630050), SP8 (−11131); chr7:21582641-21582791/DNAH11 (−117); chr7:21583278-21583303/
DNAH11 (+458); chr7:23053793-23053819/FAM126A (−36); chr7:23221437-23221489/NUPL2 (+17); chr7:2324
5819-23245836/GPNMB (−40488), NUPL2 (+24382); chr7:23245947-23245963/GPNMB (−40361), NUPL2 (+24
509); chr7:23287351-23287400/C7orf30 (−51564), GPNMB (+1060); chr7:23338826-23338950/C7orf30 (−52); c
hr7:24323329-24323343/NPY (−471); chr7:24324028-24324063/NPY (+239); chr7:24324185-24324248/NPY
(+410); chr7:24324689-24324754/NPY (+915); chr7:24324965-24325060/MPP6 (−288072), NPY (+1206); chr7:24
797037-24797067/DFNA5 (+31); chr7:25021176-25021241/OSBPL3 (−1449); chr7:25892504-25892540/NPVF
(−624417), NFE2L3 (−299325); chr7:25898205-25898445/NPVF (−630220), NFE2L3 (−293522); chr7:25898622-2
5898707/NPVF (−630560), NFE2L3 (−293182); chr7:25900377-25900433/NPVF (−632300), NFE2L3 (−291442);
chr7:26192647-26192666/NFE2L3 (+810); chr7:26897145-26897198/SKAP2 (+7169), SNX10 (+565657); chr7:
26897664-26897761/SKAP2 (+6628), SNX10 (+566198); chr7:27135771-27135979/HOXA1 (−250); chr7:27141
786-27141917/HOXA2 (+542); chr7:27143181-27143237/HOXA2 (−815); chr7:27187070-27187106/HOXA5 (−38
01), HOXA6 (+305); chr7:27187251-27187319/HOXA5 (−3998), HOXA6 (+108); chr7:27192675-27192758/HOX
A6 (−5324), HOXA7 (+3579); chr7:27195741-27195866/HOXA7 (+492); chr7:27196031-27196152/HOXA7 (+20
4); chr7:27199602-27199725/HOXA7 (−3368); chr7:27204004-27204090/HOXA7 (−7751), HOXA9 (+1102); chr7:
27204770-27205088/HOXA9 (+220); chr7:27205193-27205265/HOXA9 (−80); chr7:27205898-27206077/HOXA
9 (−839); chr7:27208953-27209044/HOXA9 (−3850); chr7:27209789-27209886/HOXA9 (−4689); chr7:27214262-
27214329/HOXA10 (−341); chr7:27223193-27223221/HOXA10 (−9252), HOXA11 (+1628); chr7:27225117-2722
5238/HOXA11 (−343); chr7:27225484-27225581/HOXA11 (−698); chr7:27227629-27227757/HOXA11 (−2858); c
hr7:27229018-27229103/HOXA11 (−4226); chr7:27239173-27239225/HOXA13 (+526); chr7:27244611-2724479
7/HOXA13 (−4979); chr7:27252819-27252895/EVX1 (−29307), HOXA13 (−13132); chr7:27260101-27260412/EV
X1 (−21907), HOXA13 (−20532); chr7:27275414-27275466/HOXA13 (−35715), EVX1 (−6724); chr7:27278994-27
279236/EVX1 (−3049); chr7:27279369-27279453/EVX1 (−2753); chr7:27284670-27284967/EVX1 (+2655), HIBA
DH (+417801); chr7:27285519-27285620/EVX1 (+3406), HIBADH (+417050); chr7:27285914-27285979/EVX1
(+3783), HIBADH (+416673); chr7:27286099-27286170/EVX1 (+3971), HIBADH (+416485); chr7:27289101-272
89169/EVX1 (+6971), HIBADH (+413485); chr7:27291119-27291238/EVX1 (+9015), HIBADH (+411441); chr7:2
8449291-28449658/CREB5 (−2669); chr7:28449782-28449857/CREB5 (−2324); chr7:28997646-28997676/TRIL
(+368); chr7:29233971-29234008/CHN2 (−131); chr7:29605950-29606055/WIPF3 (−240167), PRR15 (+2576); c
hr7:30174168-30174230/ZNRF2 (−149724), PLEKHA8 (+106222); chr7:30175446-30175572/ZNRF2 (−148414),
PLEKHA8 (+107532); chr7:30188691-30188777/ZNRF2 (−135189), PLEKHA8 (+120757); chr7:30634615-3063
4649/GARS (+451); chr7:30721943-30722018/CRHR2 (+17738), GARS (+87800); chr7:31092167-31092241/A
DCYAP1R1 (+128); chr7:31092699-31092713/ADCYAP1R1 (+630); chr7:31092880-31092894/ADCYAP1R1
(+811); chr7:31121821-31121918/ADCYAP1R1 (+29794), NEUROD6 (+258668); chr7:31375622-31375676/NEU
ROD6 (+4889), ADCYAP1R1 (+283573); chr7:31376358-31376385/NEUROD6 (+4166), ADCYAP1R1 (+28429
6); chr7:32110114-32110180/PDE1C (+228236), PPP1R17 (+383516); chr7:32110692-32110703/PDE1C (+227
685), PPP1R17 (+384067); chr7:32337983-32338043/PDE1C (+370); chr7:32338218-32338283/PDE1C (+132);
chr7:32467656-32467946/PDE1C (−129418), LSM5 (+62222); chr7:33101708-33101765/NT5C3 (+672); chr7:3
4360959-34361051/NPSR1 (−336892), BMPER (+416482); chr7:35225834-35226044/DPY19L2P1 (−165); chr7:
35226523-35226556/DPY19L2P1 (−766); chr7:35293087-35293182/TBX20 (+576); chr7:35293501-35293542/T
BX20 (+189); chr7:35293655-35293749/TBX20 (+9); chr7:35293978-35294031/TBX20 (−294); chr7:35295106-3
5295197/TBX20 (−1441); chr7:35297005-35297137/TBX20 (−3360); chr7:35297354-35297470/TBX20 (−3701); c
hr7:35298017-35298121/TBX20 (−4358); chr7:35298347-35298409/TBX20 (−4667); chr7:35298608-35298826/T
BX20 (−5006), HERPUD2 (+436055); chr7:35301009-35301101/TBX20 (−7344), HERPUD2 (+433717); chr7:354
94333-35494469/TBX20 (−200690), HERPUD2 (+240371); chr7:37392952-37393044/AOAH (−628844), ELMO1
(+95557); chr7:37487543-37487609/ELMO1 (+979); chr7:37487966-37487984/ELMO1 (+580); chr7:37960537-
37960562/SFRP4 (−4025), EPDR1 (+387); chr7:38670701-38670956/AMPH (+338); chr7:39649308-39649346/
RALA (−13825), POU6F2 (+631718); chr7:40174829-40174877/C7orf11 (−602), C7orf10 (+278); chr7:42159516-
42159575/INHBA (−416840), GLI3 (+117072); chr7:42267712-42267821/INHBA (−525061), GLI3 (+8851); chr7:
42533081-42533256/GLI3 (−256551), C7orf25 (+418982); chr7:42971730-42971804/MRPL32 (−172), PSMA2
(+38); chr7:43152208-43152413/HECW1 (+113); chr7:43153200-43153229/STK17A (−469477), HECW1 (+1017);
chr7:43945627-43945685/URGCP (+575); chr7:44114009-44114084/PGAM2 (−8861), POLM (+8082); chr7:441
43942-44144029/AEBP1 (+26); chr7:44163151-44163168/POLD2 (−13); chr7:44349607-44349655/CAMK2B
(+15599), YKT6 (+109053); chr7:44364679-44364698/CAMK2B (+541); chr7:44365082-44365117/CAMK2B (+13
0); chr7:44622046-44622092/TMED4 (−242); chr7:45299615-45299683/ADCY1 (−314476), RAMP3 (+102282); c
hr7:45613814-45613857/ADCY1 (−289); chr7:45690791-45690902/IGFBP1 (−237112), ADCY1 (+76722); chr7:4
5808106-45808164/IGFBP1 (−119824), ADCY1 (+194010); chr7:47576672-47576721/TNS3 (+45045); chr7:475
76886-47576916/TNS3 (+44841); chr7:47608342-47608494/TNS3 (+13324); chr7:47611206-47611274/TNS3
(+10502); chr7:47620648-47620718/TNS3 (+1059); chr7:48128299-48128376/UPP1 (−17); chr7:49813018-4981
3040/VWC2 (−228); chr7:49813192-49813267/VWC2 (−27); chr7:49813436-49813600/VWC2 (+261); chr7:4981
4093-49814121/VWC2 (+850); chr7:49814780-49814821/VWC2 (+1544), ZPBP (+318059); chr7:49815020-498
15116/VWC2 (+1811), ZPBP (+317792); chr7:49815364-49815656/VWC2 (+2253), ZPBP (+317350); chr7:5013
2777-50132801/C7orf72 (−2893), ZPBP (+71); chr7:50424630-50424694/IKZF1 (+80284), FIGNL1 (+93426); ch
r7:50861103-50861127/GRB10 (−61050), COBL (+523400); chr7:53287027-53287109/NONE; chr7:54609952-5
4609991/VSTM2A (−47); chr7:55087947-55087982/LANCL2 (−345176), EGFR (+1240); chr7:55517000-555170
36/LANCL2 (+83877), VOPP1 (+123182); chr7:55639355-55639426/VOPP1 (+809); chr7:56183702-56183846/
CHCHD2 (−9587); chr7:56242832-56242852/CHCHD2 (−68655), ZNF479 (+964729); chr7:56242963-56243208/
CHCHD2 (−68899), ZNF479 (+964485); chr7:56297549-56297602/CHCHD2 (−123389), ZNF479 (+909995); chr
7:56355487-56355682/CHCHD2 (−181398), ZNF479 (+851986); chr7:57063797-57063841/CHCHD2 (−889632),
ZNF479 (+143752); chr7:63250196-63250207/LOC643955 (−485768), ZNF727 (−255619); chr7:63250423-6325
0456/LOC643955 (−486006), ZNF727 (−255381); chr7:63361477-63361535/LOC643955 (−597072), ZNF727 (−1
44315); chr7:63560611-63560736/ZNF735 (−106907), ZNF727 (+54853); chr7:63642490-63642553/ZNF735 (−2
5059), ZNF727 (+136701); chr7:64029965-64030217/ZNF107 (−96420), ZNF680 (−6586); chr7:64030592-64030
697/ZNF107 (−95866), ZNF680 (−7140); chr7:64348968-64349041/ZNF273 (−14615), ZNF138 (+94234); chr7:64
349882-64349983/ZNF273 (−13687), ZNF138 (+95162); chr7:64407672-64407780/ZNF117 (+43688), ZNF273
(+44106); chr7:64408247-64408292/ZNF117 (+43144), ZNF273 (+44650); chr7:65878502-65878629/KCTD7 (−2
15302), TPST1 (+208307); chr7:65958470-65958500/KCTD7 (−135383), TPST1 (+288226); chr7:66120093-661
20114/RABGEF1 (−84879), KCTD7 (+26236); chr7:66386062-66386085/C7orf42 (−129); chr7:66767625-667676
77/TYW1 (+305834); chr7:66767963-66768025/TYW1 (+306177); chr7:69064772-69064833/AUTS2 (+898); chr
7:70596416-70596453/WBSCR17 (−1354); chr7:70596800-70596850/WBSCR17 (−964); chr7:70597090-705973
50/WBSCR17 (−569); chr7:70597914-70597990/WBSCR17 (+163); chr7:70598124-70598169/WBSCR17 (+358);
chr7:71800757-71800933/CALN1 (+76515); chr7:71801105-71801131/CALN1 (+76242); chr7:71801306-718
02206/CALN1 (+75604); chr7:71802347-71802389/CALN1 (+74992); chr7:71802523-71802577/CALN1 (+7481
0); chr7:72838573-72838707/FZD9 (−9469), FKBP6 (+96340); chr7:72848393-72848420/FZD9 (+298); chr7:730
21661-73021710/TBL2 (−28673), MLXIPL (+17184); chr7:73085335-73085412/VPS37D (+3200), DNAJC30 (+1
2407); chr7:73118155-73118233/STX1A (+15823), WBSCR22 (+20296); chr7:73121598-73121701/STX1A (+1
2367), WBSCR22 (+23752); chr7:73130446-73130520/STX1A (+3534), WBSCR22 (+32585); chr7:73183240-7
3183299/ABHD11 (−30080), CLDN3 (+1330); chr7:73508272-73508421/EIF4H (−80359), LIMK1 (+10240); chr7:
73508993-73509072/EIF4H (−79673), LIMK1 (+10926); chr7:73589073-73589126/EIF4H (+394); chr7:73621109-
73621148/LAT2 (−2958); chr7:73720763-73720869/GTF2IRD1 (−147304), CLIP2 (+17011); chr7:73721259-737
21314/GTF2IRD1 (−146833), CLIP2 (+17482); chr7:73721512-73721623/GTF2IRD1 (−146552), CLIP2 (+17763);
chr7:73727026-73727107/GTF2IRD1 (−141053), CLIP2 (+23262); chr7:73894830-73894881/GTF2I (−177174),
GTF2IRD1 (+26736); chr7:74489091-74489136/WBSCR16 (+585); chr7:74572962-74573002/NCF1C (+14834),
GTF2IRD2B (+64635); chr7:74988406-74988459/STAG3L1 (−2809), PMS2L2 (−204); chr7:75039556-75039597/
TRIM73 (+14674), POM121C (+75991); chr7:75115314-75115365/POM121C (+228); chr7:75156795-7515692
3/POM121C (−41291), HIP1 (+211424); chr7:75508417-75508482/RHBDD2 (+133); chr7:75623792-75623857/T
MEM120A (+167); chr7:75677242-75677311/MDH2 (−116), STYXL1 (+44); chr7:75796280-75796315/HSPB1
(−135577), MDH2 (+118905); chr7:75889217-75889292/HSPB1 (−42620), MDH2 (+211862); chr7:75896686-7589
6723/HSPB1 (−35170), MDH2 (+219312); chr7:79083035-79083190/MAGI2 (−223); chr7:82072562-82072646/C
ACNA2D1 (+427); chr7:82073101-82073162/CACNA2D1 (−101); chr7:84814932-84814985/SEMA3D (−63712);
chr7:84815227-84815396/SEMA3D (−64065); chr7:86274117-86274257/GRM3 (+957); chr7:86849087-868491
61/C7orf23 (−93); chr7:87505883-87505904/SLC25A40 (−202), DBF4 (+350); chr7:88388168-88388246/ZNF804
B (−546); chr7:88388902-88389046/ZNF804B (+221); chr7:89748673-89748718/STEAP1 (−34993); chr7:897839
28-89784042/STEAP1 (+296); chr7:89840890-89841066/STEAP2 (−22); chr7:89841172-89841213/STEAP2 (+1
93); chr7:91763244-91763301/CYP51A1 (+567); chr7:92219703-92219724/RBM48 (+61627), CDK6 (+246227);
chr7:92672830-92672879/CDK6 (−206914), SAMD9 (+74481); chr7:93204232-93204298/CALCR (−223); chr7:9
3519766-93519854/TFPI2 (+255); chr7:94023699-94023821/COL1A2 (−113); chr7:95026065-95026115/PON1
(−72206), PON2 (+38294); chr7:96627049-96627151/SHFM1 (−287897), DLX6 (−8190); chr7:96635452-9663548
6/DLX6 (+179); chr7:96635590-96635619/DLX6 (+315); chr7:96635972-96636033/DLX6 (+713); chr7:9665009
5-96650275/DLX5 (+3958), DLX6 (+14895); chr7:96650437-96650751/DLX5 (+3549), DLX6 (+15304); chr7:966
51077-96651136/DLX5 (+3036), DLX6 (+15817); chr7:96651963-96652017/DLX5 (+2153), DLX6 (+16700); chr
7:96653820-96653862/DLX5 (+302); chr7:97361423-97361520/TAC1 (+201); chr7:97601189-97601265/ASNS
(−99373), OCM2 (+18189); chr7:97601409-97601419/ASNS (−99560), OCM2 (+18002); chr7:97736966-9773702
9/LMTK2 (+801); chr7:98100069-98100100/NPTX2 (−146512), BAIAP2L1 (−69658); chr7:98245732-98245856/N
PTX2 (−803); chr7:98246079-98246304/NPTX2 (−405); chr7:98246508-98246533/NPTX2 (−76); chr7:98248995-
98249073/NPTX2 (+2437), TMEM130 (+218639); chr7:98467415-98467669/TMEM130 (+131); chr7:99007150-
99007197/PDAP1 (−869), BUD31 (+573); chr7:99097194-99097277/ZNF394 (+641); chr7:99097870-99097908/
ZKSCAN5 (−4384), ZNF394 (−12); chr7:99155814-99155931/ZNF655 (−575); chr7:99177663-99177694/ZNF498
(−36892), ZNF655 (+21231); chr7:99214144-99214185/ZNF498 (−406); chr7:99595336-99595462/ZKSCAN1 (−1
7820), AZGP1P1 (+17014); chr7:99647766-99647824/ZSCAN21 (+378); chr7:99678846-99678879/ZNF3 (+508);
chr7:99698537-99698621/AP4M1 (−551), MCM7 (+848); chr7:99869451-99869511/PILRB (−86145), PVRIG
(+52609); chr7:99869935-99869970/PILRB (−85673), PVRIG (+53081); chr7:99933700-99933760/PILRB (−21896),
PVRIG (+116858); chr7:100025885-100025919/MEPCE (−1352), ZCWPW1 (+400); chr7:100028353-1000284
24/ZCWPW1 (−2087), MEPCE (+1135); chr7:100203471-100203505/MOSPD3 (−6626), PCOLCE (+3606); chr7:
100210560-100210615/MOSPD3 (+474); chr7:100253842-100253997/ACTL6B (+164); chr7:100273159-10027
3178/GNB2 (+1806), GIGYF1 (+13701); chr7:100318165-100318208/EPO (−236); chr7:100426264-100426321/
EPHB4 (−1150); chr7:100426908-100427000/EPHB4 (−1811); chr7:100463780-100463824/TRIP6 (−1148); chr7:
100463954-100463995/TRIP6 (−975); chr7:100817767-100817962/VGF (−9013), NAT16 (+5692); chr7:1008233
51-100823380/NAT16 (+191); chr7:100845201-100845248/MOGAT3 (−923); chr7:100845427-100845444/MOG
AT3 (−1134); chr7:100882612-100882698/CLDN15 (−1428); chr7:100945932-100946009/FIS1 (−57600), RABL5
(+19122); chr7:100946150-100946299/FIS1 (−57854), RABL5 (+18868); chr7:100946666-100946718/FIS1 (−58
321), RABL5 (+18401); chr7:101007361-101007396/EMID2 (+1257), MYL10 (+265197); chr7:101459514-1014
59543/CUX1 (−1353); chr7:101928419-101928559/SH2B2 (+84); chr7:102066305-102066429/ORAI2 (−7629), P
RKRIP1 (+29563); chr7:102937787-102937865/PMPCB (−47); chr7:102987935-102988020/DNAJC2 (−2658), P
SMC2 (+7); chr7:103629795-103630053/RELN (+39); chr7:103630184-103630270/RELN (−264); chr7:1039687
31-103968915/LHFPL3 (−281); chr7:103969522-103969562/LHFPL3 (+438); chr7:103969679-103969693/LHFP
L3 (+582); chr7:104653187-104653230/MLL5 (−1428); chr7:104654057-104654083/MLL5 (−567); chr7:1053194
45-105319476/CDHR3 (−284196), EFCAB10 (−97485); chr7:106808481-106808524/HBP1 (−903); chr7:1068091
66-106809218/HBP1 (−214); chr7:107220642-107220679/BCAP29 (−543); chr7:108095578-108095780/NRCAM
(−215065), PNPLA8 (+70959); chr7:108210111-108210172/DNAJB9 (−47), THAP5 (+25); chr7:112429912-1124
30003/TMEM168 (+520); chr7:112430185-112430224/TMEM168 (+273); chr7:112725919-112725945/GPR85
(+610); chr7:113723284-113723338/FOXP2 (−331741), PPP1R3A (−164229); chr7:114562277-114562326/MDFI
C (+93); chr7:116165107-116165155/CAV1 (+292); chr7:116593242-116593274/ST7 (−123); chr7:116963147-1
16963330/WNT2 (+104); chr7:116964721-116964798/WNT2 (−1417); chr7:119913385-119913416/KCND2 (−32
1); chr7:120590708-120590732/ING3 (−97); chr7:120968912-120968996/WNT16 (−136); chr7:120970703-12097
0733/WNT16 (+1628), FAM3C (+65704); chr7:121036286-121036310/FAM3C (+124); chr7:121940245-121940
433/AASS (−155995), FEZF1 (+4226); chr7:121943989-121944176/FEZF1 (+482); chr7:121946983-121947097/
FEZF1 (−2475); chr7:121950265-121950428/FEZF1 (−5782), RNF133 (+388861); chr7:121950553-121950994/F
EZF1 (−6209), RNF133 (+388434); chr7:121952011-121952043/FEZF1 (−7462), RNF133 (+387181); chr7:1219
56582-121956954/FEZF1 (−12203), RNF133 (+382440); chr7:121957077-121957253/FEZF1 (−12600), RNF133
(+382043); chr7:123197660-123197705/NDUFA5 (+275); chr7:124404207-124404299/TMEM229A (−730730),
GPR37 (+1428); chr7:124404498-124404543/TMEM229A (−730998), GPR37 (+1160); chr7:124569785-124569
848/POT1 (+220); chr7:127031779-127031863/ZNF800 (+946); chr7:127176902-127177061/ZNF800 (−144215),
GCC1 (+48672); chr7:127291954-127292077/SND1 (−186); chr7:127292265-127292290/SND1 (+76); chr7:12
7671173-127671260/LRRC4 (−215); chr7:127671719-127671742/LRRC4 (−729); chr7:127671916-127672078/L
RRC4 (−995); chr7:127672382-127672576/LRRC4 (−1477); chr7:127841273-127841338/LRRC4 (−170304), LEP
(−40025); chr7:127841497-127841625/LRRC4 (−170559), LEP (−39770); chr7:127841926-127841995/LRRC4
(−170959), LEP (−39370); chr7:127881207-127881292/LEP (−81); chr7:127991574-127991607/RBM28 (−7629), P
RRT4 (+10148); chr7:127991743-127991787/RBM28 (−7803), PRRT4 (+9974); chr7:127991923-127992044/RB
M28 (−8022), PRRT4 (+9755); chr7:127992319-127992371/RBM28 (−8383), PRRT4 (+9394); chr7:128000952-1
28001006/PRRT4 (+760); chr7:128001317-128001327/PRRT4 (+417); chr7:128171222-128171234/CALU (−20
8118), METTL2B (+54445); chr7:128337595-128337787/CALU (−41655), METTL2B (+220908); chr7:12838019
1-128380234/CALU (+867); chr7:128430882-128430922/CCDC136 (−1148); chr7:128471057-128471125/FLNC
(+608); chr7:128530932-128531156/KCP (+19729), ATP6V1F (+28187); chr7:128550363-128550659/KCP (+2
62); chr7:128555706-128555724/KCP (−4942); chr7:128555996-128556139/IRF5 (−21926), KCP (−5295); chr7:1
28578269-128578324/IRF5 (+303); chr7:128580152-128580229/IRF5 (+2197), TNPO3 (+115036); chr7:128580
708-128580791/IRF5 (+2756), TNPO3 (+114477); chr7:128694922-128694980/TNPO3 (+276); chr7:128809071-
128809124/SMO (−19615), TSPAN33 (+24386); chr7:129142001-129142044/NRF1 (−109532), FAM40B (+677
49); chr7:129251911-129251952/NRF1 (+377); chr7:129418616-129418755/NRF1 (+167131), UBE2H (+17411
4); chr7:129419286-129419320/NRF1 (+167748), UBE2H (+173497); chr7:129423013-129423034/UBE2H (+16
9776), NRF1 (+171469); chr7:129424072-129424132/UBE2H (+168698), NRF1 (+172547); chr7:129691108-12
9691179/ZC3HC1 (+89); chr7:129781009-129781096/ZC3HC1 (−89820), TMEM209 (+64285); chr7:129781221-
129781458/ZC3HC1 (−90107), TMEM209 (+63998); chr7:130125975-130126111/CEP41 (−45189), MEST (−585
6); chr7:130417938-130417976/KLF14 (+931); chr7:130418415-130418452/KLF14 (+454); chr7:130418938-13
0419012/KLF14 (−87); chr7:130790809-130790864/KLF14 (−371949), MKLN1 (−221758); chr7:131449201-1314
49339/PODXL (−207894), PLXNA4 (+812053); chr7:131594418-131594430/PODXL (−353048), PLXNA4 (+6668
99); chr7:132261208-132261256/PLXNA4 (+91); chr7:132261505-132261534/PLXNA4 (−197); chr7:132937810-
132937849/EXOC4 (+7); chr7:134143587-134143700/AKR1B1 (+244); chr7:134331238-134331322/BPGM (−25
1); chr7:134851452-134851581/C7orf49 (+4061), TMEM140 (+18751); chr7:135347477-135347496/C7orf73
(+266); chr7:136554026-136554103/CHRM2 (+233); chr7:136554581-136554625/CHRM2 (+771); chr7:13655500
1-136555078/CHRM2 (+1208), PTN (+473506); chr7:136555842-136556012/CHRM2 (+2095), PTN (+472619);
chr7:137531212-137531262/DGKI (+372); chr7:137531889-137531908/DGKI (−290); chr7:137532188-1375323
73/DGKI (−672); chr7:138144836-138144901/TRIM24 (−210); chr7:139168614-139168658/KLRG2 (−179); chr7:1
39208138-139208186/CLEC2L (−512); chr7:139208570-139208614/CLEC2L (−82); chr7:139875886-139875926/
JHDM1D (+835); chr7:140097863-140097920/SLC37A3 (+419); chr7:140098254-140098296/SLC37A3 (+36);
chr7:140178831-140178857/MKRN1 (+525); chr7:140339868-140339951/MKRN1 (−160541), ADCK2 (−33043);
chr7:140340233-140340368/MKRN1 (−160932), ADCK2 (−32652); chr7:140373597-140373662/ADCK2 (+677);
chr7:140772676-140772716/AGK (−478382), MRPS33 (−57915); chr7:141400881-141400939/WEE2 (−7243), A
GK (+149832); chr7:142494834-142495033/EPHB6 (−57858), TRY6 (+16177); chr7:142495162-142495198/EP
HB6 (−57612), TRY6 (+16423); chr7:143058758-143058840/ZYX (−19561), CLCN1 (+45580); chr7:143105627-1
43105688/EPHA1 (+327); chr7:143105827-143105844/EPHA1 (+149); chr7:145813391-145813403/CNTNAP2
(−56); chr7:145813721-145813945/CNTNAP2 (+380); chr7:148580759-148580784/EZH2 (+669); chr7:1485811
58-148581192/EZH2 (+266); chr7:148762583-148762640/PDIA4 (−36830), ZNF786 (+25257); chr7:148822432-
148822493/ZNF425 (+975); chr7:148843497-148843554/ZNF398 (−1034); chr7:149112249-149112420/ZNF777
(+45718), AF035281 (+121045); chr7:149120124-149120164/ZNF777 (+37909), AF035281 (+128854); chr7:14
9120274-149120378/ZNF777 (+37727), AF035281 (+129036); chr7:149194611-149194634/ZNF746 (+275); chr
7:149321825-149321871/ZNF746 (−126950), KRBA1 (−90300); chr7:149389723-149389934/ZNF746 (−194931),
KRBA1 (−22319); chr7:149411728-149411834/KRBA1 (−367); chr7:149744402-149744461/ATP6V0E2 (+17437
5), ACTR3C (+276326); chr7:149744799-149744950/ATP6V0E2 (+174818), ACTR3C (+275883); chr7:1497450
87-149745123/ATP6V0E2 (+175048), ACTR3C (+275653); chr7:149745590-149745672/ATP6V0E2 (+175574),
ACTR3C (+275127); chr7:149746098-149746261/ATP6V0E2 (+176123), ACTR3C (+274578); chr7:149746380-
149746404/ATP6V0E2 (+176335), ACTR3C (+274366); chr7:149916903-149916914/ACTR3C (+103849), ATP
6V0E2 (+346852); chr7:149917147-149917321/ACTR3C (+103524), ATP6V0E2 (+347177); chr7:149917469-14
9917628/ACTR3C (+103209), ATP6V0E2 (+347492); chr7:149917824-149917888/ACTR3C (+102902), ATP6V
0E2 (+347799); chr7:149918191-149918262/ACTR3C (+102531), ATP6V0E2 (+348170); chr7:150020205-1500
20224/ACTR3C (+543); chr7:150020654-150020688/ACTR3C (+87); chr7:150038066-150038171/RARRES2
(+644); chr7:150038343-150038597/RARRES2 (+293); chr7:150066866-150067012/ZNF775 (−9467), REPIN1
(+1060); chr7:150621704-150621763/KCNH2 (+53668), ABP1 (+72161); chr7:150644526-150644639/KCNH2 (+3
0819), ABP1 (+95010); chr7:150652973-150653033/KCNH2 (+22399), ABP1 (+103430); chr7:150655182-1506
55624/KCNH2 (+19999), ABP1 (+105830); chr7:150657089-150657247/KCNH2 (+18234), ABP1 (+107595); chr
7:150710632-150710694/ATG9B (+10923), NOS3 (+22519); chr7:150756396-150756434/CDK5 (−1363), SLC4
A2 (−242); chr7:150783976-150784035/TMUB1 (−3386), AGAP3 (+180); chr7:150786298-150786371/AGAP3
(+2509), GBX1 (+78532); chr7:150812783-150812802/AGAP3 (+28967), GBX1 (+52074); chr7:150864397-15086
4610/GBX1 (+363); chr7:150924255-150924302/ABCF2 (+38); chr7:150942862-150942899/SMARCD3 (+2868),
CHPF2 (+13296); chr7:150949040-150949068/SMARCD3 (−3305); chr7:151106566-151106589/NUB1 (+6773
1), RHEB (+110432); chr7:151106989-151107395/NUB1 (+68345), RHEB (+109818); chr7:151145381-1511454
11/RHEB (+71614), NUB1 (+106549); chr7:151216199-151216261/RHEB (+780); chr7:151723144-151723167/
GALNT11 (+378); chr7:152132588-152132607/MLL3 (+492); chr7:152132972-152133002/MLL3 (+103); chr7:1
52133842-152133859/MLL3 (−761); chr7:152622514-152622545/ACTR3B (+165679); chr7:152623161-152623
174/ACTR3B (+166317); chr7:153445180-153445315/DPP6 (−304529), ACTR3B (+988397); chr7:153445588-1
53446175/DPP6 (−303895), ACTR3B (+989031); chr7:153446329-153446374/DPP6 (−303425), ACTR3B (+989
501); chr7:153446650-153446725/DPP6 (−303089), ACTR3B (+989837); chr7:153583530-153583631/DPP6 (−1
66196); chr7:153585250-153585293/DPP6 (−164505); chr7:153585396-153585601/DPP6 (−164278); chr7:1537
48430-153748451/DPP6 (−1336); chr7:153748649-153748846/DPP6 (−1029); chr7:153749132-153749164/DPP
6 (−629); chr7:153750043-153750249/DPP6 (+369); chr7:154002010-154002083/DPP6 (+252270), PAXIP1 (+7
92635); chr7:154705826-154705874/PAXIP1 (+88832), DPP6 (+956073); chr7:155137148-155137202/EN2 (−1
13649), INSIG1 (+47689); chr7:155167090-155167174/EN2 (−83692), INSIG1 (+77646); chr7:155167661-15516
7833/EN2 (−83077), INSIG1 (+78261); chr7:155175154-155175246/EN2 (−75624), INSIG1 (+85714); chr7:1552
42309-155242379/EN2 (−8480), INSIG1 (+152858); chr7:155242519-155242699/EN2 (−8215), INSIG1 (+15312
3); chr7:155243534-155243755/EN2 (−7179), INSIG1 (+154159); chr7:155246744-155246858/EN2 (−4023); chr
7:155247480-155247650/EN2 (−3259); chr7:155250304-155250323/EN2 (−510); chr7:155251259-155251346/E
N2 (+479); chr7:155251550-155251661/EN2 (+782); chr7:155251855-155251890/RBM33 (−185330), EN2 (+10
49); chr7:155252262-155252316/RBM33 (−184914), EN2 (+1465); chr7:155256233-155256268/RBM33 (−18095
2), EN2 (+5427); chr7:155258864-155258914/RBM33 (−178314), EN2 (+8065); chr7:155259078-155259119/RB
M33 (−178104), EN2 (+8275); chr7:155259623-155259833/RBM33 (−177475), EN2 (+8904); chr7:155259958-15
5260038/RBM33 (−177205), EN2 (+9174); chr7:155260891-155261070/RBM33 (−176222), EN2 (+10157); chr7:
155284202-155284261/RBM33 (−152971), EN2 (+33408); chr7:155302896-155302963/RBM33 (−134273), EN2
(+52106); chr7:155556566-155556651/SHH (+48358), RBM33 (+119406); chr7:155579929-155579984/SHH
(+25010), RBM33 (+142754); chr7:155595588-155595991/SHH (+9177), RBM33 (+158587); chr7:155596657-155
596712/SHH (+8282), RBM33 (+159482); chr7:155597718-155597775/SHH (+7220), RBM33 (+160544); chr7:1
55598257-155598353/SHH (+6662), RBM33 (+161102); chr7:155598827-155598940/SHH (+6083), RBM33 (+1
61681); chr7:155599312-155599362/SHH (+5630), RBM33 (+162134); chr7:155606727-155606913/SHH (−185
3); chr7:156400778-156400857/SHH (−795851), C7orf13 (+32530); chr7:156400984-156401043/SHH (−796047),
C7orf13 (+32334); chr7:156409513-156409727/SHH (−804653), C7orf13 (+23728); chr7:156701662-15670179
3/NOM1 (−40689), LMBR1 (−15826); chr7:156795355-156795401/MNX1 (+7969), NOM1 (+52961); chr7:156795
636-156795899/MNX1 (+7579), NOM1 (+53351); chr7:156796835-156797005/MNX1 (+6427), NOM1 (+54503);
chr7:156798435-156798526/MNX1 (+4866), NOM1 (+56064); chr7:156799147-156799290/MNX1 (+4128), NO
M1 (+56802); chr7:156801872-156801943/MNX1 (+1439), NOM1 (+59491); chr7:156809513-156809643/UBE3
C (−122077), MNX1 (−6231); chr7:156810522-156810597/UBE3C (−121095), MNX1 (−7213); chr7:156810801-15
6811302/UBE3C (−120603), MNX1 (−7705); chr7:156813826-156813986/UBE3C (−117749), MNX1 (−10559); chr
7:156814708-156814783/UBE3C (−116909), MNX1 (−11399); chr7:156871153-156871282/MNX1 (−67871), UBE
3C (−60437); chr7:156931564-156931622/UBE3C (−62); chr7:157295737-157295768/DNAJB6 (+166043); chr7:
157361653-157361751/DNAJB6 (+231992); chr7:157378194-157378268/DNAJB6 (+248521); chr7:157461396-
157461465/DNAJB6 (+331721), PTPRN2 (+919051); chr7:157476974-157476994/DNAJB6 (+347274), PTPRN
2 (+903498); chr7:157477555-157477604/DNAJB6 (+347870), PTPRN2 (+902902); chr7:157478019-15747840
7/DNAJB6 (+348503), PTPRN2 (+902269); chr7:157478586-157478638/DNAJB6 (+348902), PTPRN2 (+90187
0); chr7:157481250-157481533/DNAJB6 (+351682), PTPRN2 (+899090); chr7:157481657-157481741/DNAJB6
(+351989), PTPRN2 (+898783); chr7:157482074-157482200/DNAJB6 (+352427), PTPRN2 (+898345); chr7:15
7484486-157484507/DNAJB6 (+354787), PTPRN2 (+895985); chr7:157485602-157485649/DNAJB6 (+355916),
PTPRN2 (+894856); chr7:157486082-157486204/DNAJB6 (+356433), PTPRN2 (+894339); chr7:157486415-1
57486475/DNAJB6 (+356735), PTPRN2 (+894037); chr7:157486603-157486656/DNAJB6 (+356920), PTPRN2
(+893852); chr7:158110682-158110727/PTPRN2 (+269777), DNAJB6 (+980995); chr7:158203537-158203631/
PTPRN2 (+176898); chr7:158362648-158362944/PTPRN2 (+17686); chr7:158380489-158380510/PTPRN2 (−1
8); chr7:158497157-158497187/NCAPG2 (+348); chr7:158505106-158505231/NCAPG2 (−7649), ESYT2 (+117
150); chr7:158589457-158589519/NCAPG2 (−91968), ESYT2 (+32831); chr7:158620154-158620202/NCAPG2
(−122658), ESYT2 (+2141); chr7:158620858-158620911/NCAPG2 (−123365), ESYT2 (+1434); chr7:158765341-
158765441/ESYT2 (−143072), VIPR2 (+172258); chr7:158937091-158937202/VIPR2 (+502); chr7:158937375-1
58937527/VIPR2 (+198); chr7:158938046-158938131/VIPR2 (−440); chr8:357052-357083/FBXO25 (+260); chr8:
494270-494636/C8orf42 (+878); chr8:494828-494853/C8orf42 (+490); chr8:495165-495223/C8orf42 (+137); ch
r8:495523-495635/C8orf42 (−248); chr8:495878-495952/C8orf42 (−584); chr8:638495-638542/DLGAP2 (−81105
0), C8orf42 (−143188); chr8:686980-687070/DLGAP2 (−762544), C8orf42 (−191694); chr8:687218-687318/DLG
AP2 (−762301), C8orf42 (−191937); chr8:687734-687773/DLGAP2 (−761815), C8orf42 (−192423); chr8:687976-6
88026/DLGAP2 (−761568), C8orf42 (−192670); chr8:688385-688498/DLGAP2 (−761127), C8orf42 (−193111); chr
8:1950369-1950480/MYOM2 (−42733), ARHGEF10 (+178276); chr8:1972039-1972132/MYOM2 (−21072), ARH
GEF10 (+199937); chr8:2212437-2212457/MYOM2 (+219289); chr8:2418942-2418986/MYOM2 (+425806); chr
8:3573196-3573310/NONE; chr8:4754189-4754312/CSMD1 (+98077); chr8:4849263-4849296/CSMD1 (+3048);
chr8:4850323-4850418/CSMD1 (+1957); chr8:4851750-4851780/CSMD1 (+563); chr8:6264109-6264135/MCP
H1 (+9); chr8:6748046-6748180/DEFB1 (−12584), DEFA6 (+35485); chr8:6949700-6949751/FAM90A13 (−1647
00), DEFA5 (−35467); chr8:6950023-6950078/FAM90A13 (−164375), DEFA5 (−35792); chr8:7923176-7923208/L
OC100132396 (+139333), SGK223 (+316065); chr8:8559519-8559542/CLDN23 (−135); chr8:8559844-8559899/
CLDN23 (+206); chr8:8654846-8654935/ERI1 (−205423), CLDN23 (+95225); chr8:9009011-9009104/PPP1R3B
(−838); chr8:9755803-9755972/MSRA (−155942), TNKS (+342443); chr8:9756284-9756486/MSRA (−155445), T
NKS (+342940); chr8:9762690-9762751/MSRA (−149109), TNKS (+349276); chr8:9763762-9763787/MSRA (−1
48055), TNKS (+350330); chr8:10192379-10192409/PRSS55 (−190662), MSRA (+280564); chr8:10574224-105
74356/RP1L1 (−61673), SOX7 (+13732); chr8:10586829-10586922/RP1L1 (−74259), SOX7 (+1146); chr8:10588
311-10588350/SOX7 (−309); chr8:10588596-10588640/SOX7 (−596); chr8:10588950-10589008/SOX7 (−957); c
hr8:10590108-10590176/SOX7 (−2120); chr8:10591034-10591057/SOX7 (−3024); chr8:10697151-10697188/SO
X7 (−109148), XKR6 (+361705); chr8:10708311-10708327/SOX7 (−120297), XKR6 (+350556); chr8:11058167-1
1058198/XKR6 (+692); chr8:11059175-11059210/XKR6 (−318); chr8:11205422-11205445/BLK (−146087), SLC3
5G5 (+16939); chr8:11324523-11324585/BLK (−26967), SLC35G5 (+136059); chr8:11470848-11470946/GATA
4 (−90820), BLK (+119376); chr8:11471148-11471176/GATA4 (−90555), BLK (+119641); chr8:11537024-11537
156/GATA4 (−24627), BLK (+185569); chr8:11537589-11537704/GATA4 (−24070), BLK (+186126); chr8:115378
54-11538169/GATA4 (−23705), BLK (+186491); chr8:11538629-11538785/GATA4 (−23010), BLK (+187186); chr
8:11540730-11540851/GATA4 (−20926), BLK (+189270); chr8:11555167-11555473/GATA4 (−6397), BLK (+203
799); chr8:11558138-11558196/GATA4 (−3550); chr8:11558927-11558989/GATA4 (−2759); chr8:11559665-115
59706/GATA4 (−2031); chr8:11562196-11562235/GATA4 (+499); chr8:11565422-11565504/C8orf49 (−53302),
GATA4 (+3746); chr8:11565889-11566005/C8orf49 (−52818), GATA4 (+4230); chr8:11566417-11566713/C8orf
49 (−52200), GATA4 (+4848); chr8:11627452-11627472/NEIL2 (+290); chr8:11660236-11660278/FDFT1 (+67);
chr8:11872600-11872660/DEFB134 (−18870), LOC100133267 (+56626); chr8:12517074-12517105/LONRF1
(+95902), ZNF705A (+308949); chr8:12612625-12612679/LONRF1 (+340); chr8:13424253-13424344/C8orf48 (−5
3); chr8:15094277-15094366/SGCZ (+1470); chr8:15094567-15094645/SGCZ (+1186); chr8:15095084-150951
36/SGCZ (+682); chr8:15397664-15397685/TUSC3 (+79); chr8:15893837-15893888/MSR1 (+156437), TUSC3
(+496267); chr8:17014621-17014634/ZDHHC2 (+792); chr8:17103754-17103791/VPS37A (−628), CNOT7 (+61
4); chr8:17270676-17270878/MTMR7 (+263); chr8:17270997-17271029/MTMR7 (+27); chr8:17509194-175093
05/PDGFRL (+75308), MTUS1 (+149176); chr8:17780478-17780528/PCM1 (+137); chr8:17941981-17942067/
ASAH1 (−145); chr8:18245116-18245164/NAT2 (−3615); chr8:18871974-18872035/PSD3 (−809); chr8:19614781-
19614842/CSGALNACT1 (−74718), INTS10 (−60106); chr8:19674267-19674312/INTS10 (−628); chr8:19797609-
19797677/LPL (+1061), SLC18A1 (+243074); chr8:20092455-20092509/LZTS1 (+20321), ATP6V1B2 (+37778);
chr8:20160710-20160990/LZTS1 (−48047); chr8:20161651-20161666/LZTS1 (−48856); chr8:21067589-210676
59/LZTS1 (−954821), GFRA2 (+578722); chr8:21549817-21549914/GFRA2 (+96480); chr8:21646517-21646557/
GFRA2 (−191); chr8:21647584-21647675/GFRA2 (−1284); chr8:21777844-21777878/XPO7 (+681); chr8:21905
541-21905571/EPB49 (−6772), FGF17 (+5128); chr8:21905672-21905708/EPB49 (−6638), FGF17 (+5262); chr8:
21924612-21924666/EPB49 (+12311), NUDT18 (+42817); chr8:21990917-21990970/HR (−2379); chr8:220216
44-22021665/BMP1 (−998); chr8:22409218-22409253/SORBS3 (−15); chr8:22422687-22422738/PDLIM2 (−1354
1), SORBS3 (+13462); chr8:22436828-22436855/PDLIM2 (+588); chr8:22547751-22547867/BIN3 (−21148), EG
R3 (+3006); chr8:22548315-22548335/BIN3 (−21664), EGR3 (+2490); chr8:22548665-22548720/BIN3 (−22032),
EGR3 (+2122); chr8:22548824-22548881/BIN3 (−22192), EGR3 (+1962); chr8:22561217-22561395/EGR3 (−10
491), PEBP4 (+224115); chr8:23020906-23020932/TNFRSF10D (+621); chr8:23021131-23021192/TNFRSF10
D (+378); chr8:23082657-23082729/TNFRSF10A (−13); chr8:23103785-23103817/R3HCC1 (−41811), CHMP7
(+2651); chr8:23261247-23261271/LOXL2 (+463); chr8:23540437-23540467/NKX3-1 (−2); chr8:23559602-2355
9665/NKX3-1 (−19184), NKX2-6 (+4477); chr8:23563053-23563265/NKX2-6 (+952); chr8:23564024-23564192/
NKX2-6 (+3); chr8:23564669-23564702/NKX2-6 (−575); chr8:23566855-23566900/NKX2-6 (−2767); chr8:235672
14-23567311/NKX2-6 (−3152); chr8:23567583-23567657/NKX2-6 (−3509); chr8:23584017-23584093/NKX2-6
(−19944), STC1 (+128265); chr8:24770362-24770413/NEFM (−886); chr8:24771272-24771337/NEFM (+31); chr8:
24771575-24771632/NEFM (+330); chr8:24799454-24799514/NEFL (+14647), NEFM (+28210); chr8:24813464-
24813618/NEFL (+590); chr8:24813894-24814010/NEFL (+179); chr8:24816606-24816694/NEFL (−2519); chr8:
25897314-25897560/EBF2 (+5203), CDCA2 (+580924); chr8:25898123-25898395/EBF2 (+4381), CDCA2 (+58
1746); chr8:25899046-25899186/EBF2 (+3524), CDCA2 (+582603); chr8:25900693-25900780/EBF2 (+1903), C
DCA2 (+584224); chr8:25905629-25905695/EBF2 (−3022); chr8:25905993-25906080/EBF2 (−3397); chr8:25906
974-25907061/EBF2 (−4378); chr8:25907751-25908063/BNIP3L (−332616), EBF2 (−5267); chr8:25908425-2590
8502/BNIP3L (−332059), EBF2 (−5824); chr8:26240429-26240445/BNIP3L (−86); chr8:26241035-26241050/BNI
P3L (+520); chr8:26298728-26298836/BNIP3L (+58259), PNMA2 (+72701); chr8:26721765-26721919/ADRA1A
(+1080), DPYSL2 (+350133); chr8:26722581-26722717/ADRA1A (+273); chr8:26724440-26724484/ADRA1A
(−1540); chr8:27221338-27221422/PTK2B (+38384), CHRNA2 (+115433); chr8:27695407-27695447/PBK (−78); c
hr8:27758917-27758956/PBK (−63588), SCARA5 (+91432); chr8:28269963-28269978/FZD3 (−81751), ZNF395
(−25994); chr8:28479673-28479739/EXTL3 (−79447), FZD3 (+127984); chr8:29120598-29120620/KIF13B (+1);
chr8:30769783-30769822/PPP2CB (−99451), PURG (+120514); chr8:30770110-30770157/PPP2CB (−99782), P
URG (+120183); chr8:31498015-31498153/NRG1 (−907644), WRN (+607306); chr8:32406237-32406351/NRG1
(+566); chr8:33342426-33342459/MAK16 (−242); chr8:33424714-33424756/RNF122 (−92); chr8:35092703-350
92993/UNC5D (−127); chr8:35093160-35093225/UNC5D (+218); chr8:35093543-35093597/UNC5D (+595); chr
8:35093974-35094035/UNC5D (+1030); chr8:37555740-37555815/ERLIN2 (−38319), ZNF703 (+2477); chr8:37
556119-37556142/ERLIN2 (−37966), ZNF703 (+2830); chr8:37557258-37557330/ERLIN2 (−36803), ZNF703 (+3
993); chr8:37655376-37655475/GPR124 (+1025), BRF2 (+52005); chr8:37655991-37656049/GPR124 (+1619),
BRF2 (+51411); chr8:37756575-37756610/RAB11FIP1 (+422); chr8:37822529-37822569/GOT1L1 (−24902), A
DRB3 (+1635); chr8:37823532-37823789/ADRB3 (+523); chr8:37887398-37887456/EIF4EBP1 (−593); chr8:379
62789-37962832/ASH2L (−200); chr8:37963427-37963451/ASH2L (+428); chr8:38323735-38323755/FGFR1
(+1618), LETM2 (+79786); chr8:38324749-38324811/FGFR1 (+583); chr8:38412004-38412143/FGFR1 (−86711),
RNF5P1 (+46701); chr8:38508556-38508657/TACC1 (−136115), RNF5P1 (−49832); chr8:38757676-38757771/P
LEKHA2 (−1029); chr8:38759230-38759277/PLEKHA2 (+501); chr8:38831597-38832135/HTRA4 (+198); chr8:3
8853645-38853713/ADAM9 (−826), TM2D2 (+362); chr8:41165919-41166000/ZMAT4 (−410617), SFRP1 (+103
0); chr8:41166152-41166266/SFRP1 (+781); chr8:41166680-41166745/SFRP1 (+277); chr8:41166989-411670
25/SFRP1 (−17); chr8:41219115-41219207/GOLGA7 (−128920), SFRP1 (−52171); chr8:41347851-41347909/GO
LGA7 (−201); chr8:41424466-41424534/AGPAT6 (−11207), GINS4 (+37775); chr8:41425130-41425243/AGPAT
6 (−10520), GINS4 (+38462); chr8:41511107-41511147/NKX6-3 (−6252), ANK1 (+243153); chr8:41624376-4162
4412/NKX6-3 (−119519), ANK1 (+129886); chr8:41624561-41624633/NKX6-3 (−119722), ANK1 (+129683); chr8:
41655058-41655301/NKX6-3 (−150305), ANK1 (+99100); chr8:41733654-41733684/NKX6-3 (−228794), ANK1
(+20611); chr8:41753753-41753770/ANK1 (+518); chr8:42052369-42052510/PLAT (+12754), AP3M2 (+41976);
chr8:42195985-42196025/POLB (+32); chr8:42911980-42912019/FNTA (+558); chr8:43101742-43101777/HGS
NAT (+106168); chr8:43101979-43102074/HGSNAT (+106435); chr8:43102407-43102486/HGSNAT (+106855);
chr8:43102596-43102666/HGSNAT (+107039); chr8:47529111-47529145/NONE; chr8:48100757-48100826/C
EBPD (+549934); chr8:49293525-49293580/EFCAB1 (+354317), UBE2V2 (+372558); chr8:49309093-4930919
8/EFCAB1 (+338724), UBE2V2 (+388151); chr8:49309757-49309797/EFCAB1 (+338093), UBE2V2 (+388782);
chr8:49343030-49343136/EFCAB1 (+304787), UBE2V2 (+422088); chr8:49427121-49427274/EFCAB1 (+2206
72), UBE2V2 (+506203); chr8:49782886-49782922/EFCAB1 (−135034), SNAI2 (+51095); chr8:50822358-50822
494/SNTG1 (−2171); chr8:50824308-50824352/SNTG1 (−267); chr8:52812091-52812151/PCMTD1 (−386); chr8:
53477737-53477944/FAM150A (+180); chr8:53852343-53852434/NPBWR1 (−79); chr8:53852914-53853111/N
PBWR1 (+545); chr8:53853514-53853579/NPBWR1 (+1079), OPRK1 (+310647); chr8:54163350-54163405/OP
RK1 (+816); chr8:54163569-54163648/OPRK1 (+585); chr8:54164127-54164390/OPRK1 (−65); chr8:54789845-
54789885/RGS20 (+25497), TCEA1 (+145143); chr8:54791782-54791897/RGS20 (+27472), TCEA1 (+143168);
chr8:54792022-54792084/RGS20 (+27685), TCEA1 (+142955); chr8:54792671-54792701/RGS20 (+28318), T
CEA1 (+142322); chr8:54794781-54794826/RGS20 (+30436), TCEA1 (+140204); chr8:54794950-54795139/R
GS20 (+30677), TCEA1 (+139963); chr8:54933978-54934035/TCEA1 (+1001), RGS20 (+169639); chr8:549345
96-54934624/TCEA1 (+398); chr8:55366368-55366951/SOX17 (−3835); chr8:55370433-55370567/SOX17 (+5);
chr8:55370714-55370835/SOX17 (+280); chr8:55371033-55371172/SOX17 (+608); chr8:55371376-55371439/
SOX17 (+913); chr8:55371725-55371993/RP1 (−156768), SOX17 (+1364); chr8:55372172-55372416/RP1 (−156
333), SOX17 (+1799); chr8:55379231-55379295/RP1 (−149364), SOX17 (+8768); chr8:55379472-55379721/RP
1 (−149030), SOX17 (+9102); chr8:55379831-55380036/RP1 (−148693), SOX17 (+9439); chr8:55380144-55380
175/RP1 (−148467), SOX17 (+9665); chr8:55382673-55383153/RP1 (−145714), SOX17 (+12418); chr8:5601389
3-56014011/XKR4 (−1065); chr8:56014185-56014376/XKR4 (−736); chr8:56015053-56015185/XKR4 (+102); chr
8:56015662-56015749/XKR4 (+689); chr8:56986598-56986641/RPS20 (+520); chr8:57025620-57025775/MOS
(+843); chr8:57026322-57026501/MOS (+129); chr8:57069738-57069850/MOS (−43253), PLAG1 (+54065); chr
8:57358147-57358261/PENK (+389); chr8:57358392-57358448/PENK (+173); chr8:57359092-57359259/PENK
(−583); chr8:57360626-57360769/PENK (−2105); chr8:58055164-58055187/FAM110B (−851937), IMPAD1 (−148
746); chr8:58907115-58907135/FAM110B (+12); chr8:58907419-58907483/FAM110B (+338); chr8:59058261-5
9058282/UBXN2B (−265551), FAM110B (+151159); chr8:61764726-61764738/CLVS1 (−435793), CHD7 (+1734
08); chr8:61821427-61821458/CLVS1 (−379082), CHD7 (+230119); chr8:65282005-65282332/BHLHE22 (−2106
26); chr8:65282441-65282640/BHLHE22 (−210254); chr8:65282945-65283041/BHLHE22 (−209802); chr8:65283
469-65283506/BHLHE22 (−209307); chr8:65286067-65286370/BHLHE22 (−206576); chr8:65290682-65290897/
BHLHE22 (−202005); chr8:65293194-65293265/BHLHE22 (−199565); chr8:65489583-65489646/BHLHE22 (−31
80); chr8:65490709-65490762/BHLHE22 (−2059); chr8:65491101-65491294/BHLHE22 (−1597); chr8:65493955-
65494076/BHLHE22 (+1221), CYP7B1 (+217332); chr8:65711084-65711221/CYP7B1 (+195); chr8:66557337-6
6557366/MTFR1 (+464); chr8:67090453-67090473/CRH (+383); chr8:67344702-67344809/ADHFE1 (+38); chr8:
67424553-67424623/ADHFE1 (+79870), MYBL1 (+100892); chr8:67525189-67525238/MYBL1 (+266); chr8:67
525403-67525435/MYBL1 (+61); chr8:67873493-67873798/TCF24 (+1179), C8orf45 (+90662); chr8:67874051-
67874164/TCF24 (+717); chr8:67874673-67874755/TCF24 (+111); chr8:67974212-67974225/CSPP1 (−2384),
COPS5 (+343); chr8:68864471-68864545/PREX2 (−95); chr8:68864907-68864942/PREX2 (+322); chr8:692430
67-69243284/C8orf34 (+219); chr8:69243903-69243963/C8orf34 (+976); chr8:70623421-70623536/SULF1 (+83
472), SLCO5A1 (+123820); chr8:70907054-70907109/SLCO5A1 (−159783), PRDM14 (+76480); chr8:70981934-
70982262/SLCO5A1 (−234799), PRDM14 (+1464); chr8:70982567-70982850/PRDM14 (+853); chr8:70983870-
70984016/PRDM14 (−381); chr8:70984293-70984343/PRDM14 (−756); chr8:70984662-70984744/PRDM14 (−11
41); chr8:71314385-71314426/PRDM14 (−330844), NCOA2 (+1614); chr8:71519882-71519912/TRAM1 (+797);
chr8:71520638-71520665/TRAM1 (+42); chr8:72459571-72459759/EYA1 (−190686), MSC (+297066); chr8:724
59897-72459960/EYA1 (−190950), MSC (+296802); chr8:72460298-72460433/EYA1 (−191387), MSC (+296365);
chr8:72470206-72470259/EYA1 (−201254), MSC (+286498); chr8:72519460-72519475/EYA1 (−250489), MSC
(+237263); chr8:72754361-72754490/EYA1 (−485447), MSC (+2305); chr8:72755815-72756655/MSC (+496); c
hr8:72917429-72917515/MSC (−160741), TRPA1 (+70347); chr8:73163661-73163859/KCNB2 (−285866), TRPA
1 (−175941); chr8:73449955-73450026/KCNB2 (+365); chr8:74005661-74005798/C8orf84 (−223); chr8:7465909
1-74659124/STAU2 (+54); chr8:74790762-74790822/UBE2W (+318); chr8:74884260-74884301/TMEM70 (−409
6), TCEB1 (+241); chr8:76316556-76316614/HNF4G (−135618), CRISPLD1 (+419877); chr8:77594675-775947
57/ZFHX4 (+1201), PEX2 (+318564); chr8:80696058-80696101/HEY1 (−15982), MRPS28 (+246426); chr8:8080
4117-80804178/HEY1 (−124050), MRPS28 (+138358); chr8:80804290-80804306/HEY1 (−124200), MRPS28
(+138208); chr8:80941978-80942045/MRPS28 (+494); chr8:82753897-82753939/SNX16 (+603); chr8:85094841-
85094922/RALYL (−2218); chr8:85096773-85096852/RALYL (−287); chr8:85097003-85097062/RALYL (−67); chr
8:86350567-86350926/CA3 (−309); chr8:87081678-87081763/PSKH2 (+130); chr8:87520972-87521042/FAM82
B (+2); chr8:87526737-87526780/CPNE3 (+103); chr8:89340053-89340081/MMP16 (−350); chr8:89340237-893
40273/MMP16 (−538); chr8:90913978-90914036/OSGIN2 (−755); chr8:91095084-91095141/CALB1 (−6); chr8:91
803822-91803909/NECAB1 (−55); chr8:91997509-91997527/TMEM55A (+55685), NECAB1 (+193597); chr8:93
114242-93114306/RUNX1T1 (−6392), C8orf83 (+864098); chr8:94508197-94508294/C8orf83 (−529874), RBM1
2B (+244978); chr8:94752511-94752589/RBM12B (+674); chr8:94929541-94929574/PDP1 (−434); chr8:949297
59-94929775/PDP1 (−225); chr8:95651269-95651324/ESRP1 (−2067); chr8:95653240-95653290/ESRP1 (−99);
chr8:95908075-95908097/CCNE2 (−604); chr8:96037649-96037701/C8orf38 (+461); chr8:96193484-96193591/
PLEKHF2 (+47589), GDF6 (+979482); chr8:96281737-96281794/PLEKHF2 (+135817), GDF6 (+891254); chr8:
97156692-97156897/GDF6 (+16225); chr8:97157243-97157666/GDF6 (+15565); chr8:97157898-97158017/GD
F6 (+15062); chr8:97168078-97168213/GDF6 (+4874); chr8:97169620-97169708/GDF6 (+3356); chr8:9716995
6-97170053/GDF6 (+3015); chr8:97170338-97170377/GDF6 (+2662); chr8:97171265-97171317/GDF6 (+1729);
chr8:97171959-97172018/GDF6 (+1031); chr8:97172740-97172821/GDF6 (+239); chr8:97173864-97173920/
GDF6 (−872); chr8:97505763-97505801/SDC2 (−100); chr8:97506049-97506177/SDC2 (+231); chr8:97506408-
97506447/SDC2 (+546); chr8:97657088-97657174/PGCP (−368); chr8:98289868-98289922/TSPYL5 (+281); ch
r8:99058508-99058585/RPL30 (−729); chr8:99076683-99076759/RPL30 (−18903), HRSP12 (+52697); chr8:994
38719-99438739/KCNS2 (−521); chr8:99838387-99838487/STK3 (−528); chr8:99952144-99952198/OSR2 (−446
0); chr8:99952350-99952511/OSR2 (−4200); chr8:99952933-99952968/OSR2 (−3680); chr8:99954563-9995467
8/OSR2 (−2010); chr8:99959933-99959960/VPS13B (−65547), OSR2 (+3316); chr8:99960657-99960752/VPS13
B (−64789), OSR2 (+4074); chr8:99961174-99961568/VPS13B (−64123), OSR2 (+4740); chr8:99984871-99984
923/VPS13B (−40597), OSR2 (+28266); chr8:99986117-99986199/VPS13B (−39336), OSR2 (+29527); chr8:999
86527-99986791/VPS13B (−38835), OSR2 (+30028); chr8:100025727-100025796/VPS13B (+268); chr8:10002
5932-100025965/VPS13B (+455); chr8:101118491-101118658/RGS22 (−231); chr8:101571575-101571603/AN
KRD46 (+423); chr8:101733712-101733741/PABPC1 (+588); chr8:101733960-101734092/PABPC1 (+289); chr
8:102236352-102236442/GRHL2 (−268271), ZNF706 (−18437); chr8:103541174-103541252/UBR5 (−116296), O
DF1 (−22635); chr8:103750820-103750885/KLF10 (−82870), AZIN1 (+125544); chr8:103807463-103807542/KL
F10 (−139520), AZIN1 (+68894); chr8:104153562-104153681/BAALC (+701); chr8:104311026-104311076/FZD
6 (+390); chr8:105235502-105235643/TM7SF4 (−116481), RIMS2 (+722597); chr8:105235804-105235863/TM7
SF4 (−116220), RIMS2 (+722858); chr8:105478780-105479247/DPYS (+263); chr8:106331074-106331083/ZFP
M2 (−68); chr8:106331257-106331443/ZFPM2 (+203); chr8:106331974-106332003/ZFPM2 (+842); chr8:109095
437-109095505/RSPO2 (+442); chr8:109095974-109096033/RSPO2 (−91); chr8:109799740-109799888/TMEM
74 (−44); chr8:110656828-110656890/SYBU (+192); chr8:110657173-110657196/SYBU (−134); chr8:110986264-
110986328/SYBU (−329245), KCNV1 (+1125); chr8:114444394-114444481/CSMD3 (+4804); chr8:114802671-
114802717/CSMD3 (−353452); chr8:116660572-116660615/TRPS1 (+20634); chr8:116679743-116679829/TR
PS1 (+1442); chr8:117886963-117887066/RAD21 (+90); chr8:118532869-118532906/MED30 (−77); chr8:11912
3400-119123459/EXT1 (+628); chr8:119633489-119633554/EXT1 (−509464), TNFRSF11B (+330861); chr8:119
633778-119633870/EXT1 (−509766), TNFRSF11B (+330559); chr8:120428923-120428985/NOV (+402); chr8:1
20868394-120868459/DSCC1 (−257); chr8:123793264-123793324/ZHX2 (−607); chr8:124169050-124169099/W
DR67 (+84155), C8orf76 (+84563); chr8:124285963-124286033/ZHX1 (+729); chr8:124428992-124429023/WD
YHV1 (+43); chr8:124553797-124553828/FBXO32 (−320); chr8:126442040-126442109/TRIB1 (−488); chr8:1265
88124-126588227/TRIB1 (+145613), FAM84B (+982535); chr8:131058381-131058460/GSDMC (−259287), ASA
P1 (+397485); chr8:132052300-132052398/ADCY8 (+486); chr8:132052516-132052589/ADCY8 (+282); chr8:1
32054584-132054593/ADCY8 (−1754); chr8:133492111-133492127/KCNQ3 (+885); chr8:133492631-13349271
2/KCNQ3 (+332); chr8:133493752-133493782/KCNQ3 (−763); chr8:139275425-139275495/COL22A1 (+650776);
chr8:139508947-139509549/COL22A1 (+416988); chr8:139509671-139509693/COL22A1 (+416554); chr8:14
0715095-140715219/KCNK9 (+142); chr8:140715588-140715699/KCNK9 (−345); chr8:140716119-140716137/
KCNK9 (−829); chr8:140716310-140716339/KCNK9 (−1026); chr8:141404985-141405049/KCNK9 (−689718), TR
APPC9 (+63661); chr8:141467793-141467845/TRAPPC9 (+859); chr8:141521933-141521946/CHRAC1 (+543);
chr8:141552182-141552246/CHRAC1 (+30817), EIF2C2 (+93432); chr8:141608979-141609047/EIF2C2 (+366
33), CHRAC1 (+87616); chr8:141646269-141646330/EIF2C2 (−654); chr8:141849213-141849295/EIF2C2 (−203
608), PTK2 (+162158); chr8:142011063-142011091/PTK2 (+335); chr8:142046287-142046339/PTK2 (−34901),
SLC45A4 (+192360); chr8:142099939-142100059/PTK2 (−88587), SLC45A4 (+138674); chr8:142105795-14210
5835/PTK2 (−94403), SLC45A4 (+132858); chr8:142160080-142160270/PTK2 (−148763), SLC45A4 (+78498); c
hr8:142216529-142216598/PTK2 (−205152), SLC45A4 (+22109); chr8:142216898-142217015/PTK2 (−205545),
SLC45A4 (+21716); chr8:142276277-142276532/SLC45A4 (−37732), GPR20 (+100960); chr8:142297852-1422
97913/SLC45A4 (−59210), GPR20 (+79482); chr8:142411558-142411675/GPR20 (−34252), PTP4A3 (−20390); c
hr8:142412512-142412666/GPR20 (−35224), PTP4A3 (−19418); chr8:142427219-142427304/PTP4A3 (−4745); c
hr8:142428292-142428316/PTP4A3 (−3703); chr8:142528141-142528198/FLJ43860 (−10840), TSNARE1 (+956
373); chr8:142528403-142528454/FLJ43860 (−11099), TSNARE1 (+956114); chr8:142528607-142528670/FLJ4
3860 (−11309), TSNARE1 (+955904); chr8:142528782-142528834/FLJ43860 (−11478), TSNARE1 (+955735); c
hr8:142528962-142529027/FLJ43860 (−11665), TSNARE1 (+955548); chr8:143020715-143020769/FLJ43860
(−503412), TSNARE1 (+463801); chr8:143498274-143498386/BAI1 (−47047), TSNARE1 (−13787); chr8:1435096
07-143509628/BAI1 (−35759), TSNARE1 (−25075); chr8:143532510-143532541/TSNARE1 (−47983), BAI1 (−128
51); chr8:143533641-143533708/TSNARE1 (−49132), BAI1 (−11702); chr8:143545588-143545634/BAI1 (+234);
chr8:143545788-143546251/BAI1 (+643); chr8:143553067-143553170/BAI1 (+7742), ARC (+142714); chr8:143
591807-143591888/BAI1 (+46471), ARC (+103985); chr8:143592044-143592101/BAI1 (+46696), ARC (+10376
0); chr8:143592279-143592358/BAI1 (+46942), ARC (+103514); chr8:143592579-143592663/BAI1 (+47244), A
RC (+103212); chr8:143695906-143695943/ARC (−92); chr8:143762027-143762146/PSCA (+213); chr8:143809
370-143809517/C8orf55 (+823); chr8:143858820-143858864/LYNX1 (−7596), LY6D (+9166); chr8:143859020-1
43859071/LYNX1 (−7800), LY6D (+8962); chr8:143859281-143859337/LYNX1 (−8063), LY6D (+8699); chr8:144
105788-144105841/LY6E (+5913), LY6H (+135940); chr8:144161962-144162002/LY6E (+62080), LY6H (+7977
3); chr8:144241522-144241583/LY6H (+202); chr8:144241703-144241757/LY6H (+25); chr8:144349675-14434
9708/GLI4 (+85); chr8:144503225-144503284/MAFA (+9347), RHPN1 (+52230); chr8:144598828-144598953/
MAFA (−86289), ZC3H3 (+24729); chr8:144651659-144651706/C8orf73 (+3245), GSDMD (+11206); chr8:14465
9987-144660143/NAPRT1 (+448); chr8:144660548-144660589/NAPRT1 (−56); chr8:144664561-144664600/NA
PRT1 (−4068); chr8:144717844-144717871/TSTA3 (−18126), ZNF623 (−14096); chr8:144789812-144789822/M
APK15 (−8690), ZNF707 (+23195); chr8:144798641-144798676/MAPK15 (+152); chr8:144815966-144815984/F
AM83H (−61); chr8:144853523-144853582/FAM83H (−37639), SCRIB (+43996); chr8:144922907-144922959/N
RBP2 (+213); chr8:144965156-144965253/EPPK1 (−17771), PLEC (+59839); chr8:145049262-145049284/PLE
C (−24229), PARP10 (+11362); chr8:145103611-145103715/OPLAH (+11921), SPATC1 (+17081); chr8:145103
905-145103950/OPLAH (+11656), SPATC1 (+17346); chr8:145104391-145104420/OPLAH (+11178), SPATC1
(+17824); chr8:145104664-145104766/OPLAH (+10869), SPATC1 (+18133); chr8:145105890-145105948/OPL
AH (+9665), SPATC1 (+19337); chr8:145106074-145106173/OPLAH (+9460), SPATC1 (+19542); chr8:145106
348-145106415/OPLAH (+9202), SPATC1 (+19800); chr8:145106833-145107011/OPLAH (+8662), SPATC1
(+20340); chr8:145129242-145129294/EXOSC4 (−4254); chr8:145239579-145239641/HEATR7A (+36691), BOP1
(+91570); chr8:145557228-145557292/DGAT1 (−6693), SCRT1 (+2683); chr8:145557516-145557599/DGAT1
(−6991), SCRT1 (+2385); chr8:145559887-145560005/SCRT1 (−3); chr8:145582682-145582713/C8ORFK29 (−41
24), FBXL6 (−515), GPR172A (+422); chr8:145653887-145653907/VPS28 (+30); chr8:145691793-145691818/C
YHR1 (−1327), KIFC2 (+68); chr8:145691938-145692043/CYHR1 (−1512), KIFC2 (+253); chr8:145697983-1456
98378/FOXH1 (+3537), KIFC2 (+6443); chr8:145703038-145703068/FOXH1 (−1335); chr8:145725852-1457260
06/GPT (−3536); chr8:145734620-145734656/MFSD3 (+86); chr8:145735246-145735280/MFSD3 (+711); chr8:1
45747509-145747523/RECQL4 (−4306), LRRC14 (+4153); chr8:145747743-145748173/RECQL4 (−4748), LRR
C14 (+4595); chr8:145748382-145748486/LRRC24 (+3982), LRRC14 (+5071); chr8:145755318-145755365/LR
RC24 (−2926); chr8:145806625-145806709/LRRC24 (−54251), ARHGAP39 (+32221); chr8:145900764-1459007
80/ARHGAP39 (−61884), ZNF251 (+80198); chr8:145901141-145901189/ARHGAP39 (−62277), ZNF251 (+7980
5); chr8:145910352-145910371/ARHGAP39 (−71474), ZNF251 (+70608); chr8:145910827-145910849/ARHGA
P39 (−71950), ZNF251 (+70132); chr8:145911757-145911813/ARHGAP39 (−72897), ZNF251 (+69185); chr8:14
5925429-145925458/ARHGAP39 (−86556), ZNF251 (+55526); chr8:145926069-145926099/ARHGAP39 (−8719
6), ZNF251 (+54886); chr8:145938498-145938528/ARHGAP39 (−99625), ZNF251 (+42457); chr8:145938693-1
45938722/ARHGAP39 (−99820), ZNF251 (+42262); chr8:145938866-145938960/ARHGAP39 (−100025), ZNF25
1 (+42057); chr8:145955580-145955702/ARHGAP39 (−116753), ZNF251 (+25329); chr8:145980676-14598071
9/ZNF251 (+272); chr8:146017556-146017579/ZNF34 (−4843), RPL8 (+237); chr8:146126850-146126867/ZNF
250 (−13); chr8:146127827-146127853/ZNF250 (−994); chr8:146276473-146276556/ZNF252 (−48230); chr9:117
960-118139/FOXD4 (+367); chr9:707111-707165/DMRT1 (−134552), KANK1 (+202435); chr9:841406-841449/
DMRT1 (−262); chr9:842032-842207/DMRT1 (+430); chr9:842533-842610/DMRT1 (+882); chr9:842748-842779/
DMRT3 (−134200), DMRT1 (+1074); chr9:969615-969667/DMRT3 (−7323), DMRT1 (+127951); chr9:970105-97
0185/DMRT3 (−6819), DMRT1 (+128455); chr9:970912-970992/DMRT3 (−6012), DMRT1 (+129262); chr9:9713
39-971638/DMRT3 (−5475), DMRT1 (+129799); chr9:972169-972189/DMRT3 (−4785); chr9:973021-973183/DM
RT3 (−3862); chr9:1042501-1042615/DMRT2 (−8062), DMRT3 (+65594); chr9:1045772-1045840/DMRT2 (−4814);
chr9:1046043-1046097/DMRT2 (−4550); chr9:1046219-1046379/DMRT2 (−4321); chr9:2621036-2621093/VLD
LR (−728); chr9:4489679-4489712/SLC1A1 (−731); chr9:4680366-4680418/CDC37L1 (+826); chr9:4792648-479
2677/RCL1 (−171); chr9:5628513-5628586/KIAA1432 (−569); chr9:6007416-6007439/RANBP6 (+8212), MLANA
(+116519); chr9:6644368-6644539/GLDC (+1238), UHRF2 (+231303); chr9:8857347-8857406/NONE; chr9:10
612991-10613046/PTPRD (−296); chr9:13278420-13278571/MPDZ (−28125); chr9:14346066-14346184/NFIB
(−32080), ZDHHC21 (+347355); chr9:14350012-14350046/NFIB (−35984), ZDHHC21 (+343451); chr9:14693316-
14693379/ZDHHC21 (+132); chr9:14993255-14993662/FREM1 (−82466), TTC39B (+313899); chr9:15306946-1
5306998/TTC39B (+386); chr9:16154671-16154745/PSIP1 (−643705), BNC2 (+716078); chr9:17294995-17295
056/SH3GL2 (−283927), CNTLN (+159988); chr9:17906433-17906460/ADAMTSL1 (−567632), SH3GL2 (+32749
4); chr9:17907371-17907450/ADAMTSL1 (−566668), SH3GL2 (+328458); chr9:18438719-18438768/ADAMTSL
1 (−35335), SH3GL2 (+859791); chr9:19788902-19788934/SLC24A2 (−1901); chr9:19934444-19934502/SLC24
A2 (−147456), MLLT3 (+688041); chr9:21335631-21335700/KLHL9 (−237); chr9:21965425-21965569/CDKN2A
(+9635), MTAP (+162862); chr9:21968434-21968456/CDKN2A (+6687), MTAP (+165810); chr9:21969688-2196
9747/CDKN2A (+5414), MTAP (+167083); chr9:21971155-21971184/CDKN2A (+3962), MTAP (+168535); chr9:
21974077-21974181/CDKN2A (+1003), MTAP (+171494); chr9:21975117-21975190/CDKN2A (−22); chr9:2200
6153-22006227/CDKN2A (−11700), CDKN2B (+3122); chr9:23820842-23821051/ELAVL2 (+5116); chr9:238313
71-23831450/ELAVL2 (−5348); chr9:27529104-27529157/MOB3B (+719); chr9:29212171-29212210/LINGO2
(−492888); chr9:32551244-32551271/DDX58 (−24936), TOPORS (+1368); chr9:32572966-32573026/NDUFB6
(+186); chr9:32782936-32783083/TMEM215 (−487); chr9:32783221-32783259/TMEM215 (−257); chr9:32783420-
32783590/TMEM215 (+8); chr9:33024949-33025024/DNAJA1 (−222); chr9:33076435-33076517/SMU1 (+238);
chr9:33167597-33167644/B4GALT1 (−265); chr9:33290318-33290342/NFX1 (−88); chr9:34381366-34381416/KI
AA1161 (−4497); chr9:34577992-34578082/ENHO (−55000), CNTFR (+11698); chr9:34578256-34578408/ENHO
(−55295), CNTFR (+11403); chr9:34591912-34591969/CNTFR (−2206); chr9:34593053-34593243/CNTFR (−34
13); chr9:34622918-34622970/DCTN3 (−2448); chr9:34624586-34624646/DCTN3 (−4120); chr9:34629077-3462
9094/ARID3C (−1075); chr9:34629292-34629341/ARID3C (−1306); chr9:34809559-34809876/KIAA1045 (−14847
4), FAM205A (−80183); chr9:35490323-35490469/RUSC2 (+389); chr9:35649720-35649823/CD72 (−31348), SI
T1 (+1175); chr9:35665028-35665066/C9orf100 (+231); chr9:35690141-35690163/TPM2 (−99); chr9:35731936-
35731976/CREB3 (−361), TLN1 (+436); chr9:35791707-35791745/NPR2 (−680); chr9:35815153-35815218/SPA
G8 (−2927), HINT2 (−144); chr9:35846432-35846468/TMEM8B (+17221), OR13J1 (+23948); chr9:35972182-35
972320/RECK (−64659), OR2S2 (−14100); chr9:36258646-36258697/GNE (+18381), CLTA (+67819); chr9:3645
8538-36458603/MELK (−114334), RNF38 (−58275); chr9:36739598-36739730/MELK (+166759), PAX5 (+29481
2); chr9:36986097-36986116/PAX5 (+48369), MELK (+413202); chr9:36986787-36986847/PAX5 (+47659), ME
LK (+413912); chr9:37002602-37002818/PAX5 (+31766), MELK (+429805); chr9:37026352-37026433/PAX5
(+8083), MELK (+453488); chr9:37027272-37027324/PAX5 (+7178), MELK (+454393); chr9:37465034-37465217/
ZBTB5 (+281); chr9:37800567-37800633/DCAF10 (−190); chr9:38392941-38393000/ALDH1B1 (+310); chr9:38
621259-38621329/IGFBPL1 (−196850), CNTNAP3 (+667006); chr9:40332461-40332543/FAM75A3 (−367789), F
AM75A2 (+447527); chr9:42718286-42718298/FOXD4L4 (+1058), FAM75A6 (+912438); chr9:43134565-43134
611/FOXD4L4 (+417354), FAM75A6 (+496142); chr9:43134940-43134982/FOXD4L4 (+417727), FAM75A6 (+4
95769); chr9:43685188-43685276/CNTNAP3B (+347); chr9:68377662-68377694/ANKRD20A3 (+450917), FOX
D4L6 (+824526); chr9:68410945-68410969/ANKRD20A3 (+484196), FOXD4L6 (+791247); chr9:68411138-684
11152/ANKRD20A3 (+484384), FOXD4L6 (+791059); chr9:68413176-68413225/ANKRD20A3 (+486440), FOX
D4L6 (+789003); chr9:69196800-69196930/FOXD4L6 (+5339); chr9:69197259-69197435/FOXD4L6 (+4857); c
hr9:69201441-69201530/FOXD4L6 (+718); chr9:70922116-70922353/PGM5 (−49580), FOXD4L3 (+4452); chr9:
70922512-70922806/PGM5 (−49156), FOXD4L3 (+4876); chr9:70923053-70923114/PGM5 (−48731), FOXD4L3
(+5301); chr9:70972154-70972339/PGM5 (+432); chr9:71735730-71735786/TJP2 (−84320), FXN (+85279); chr
9:71789261-71789452/TJP2 (−30721), FXN (+138878); chr9:71940216-71940263/FAM189A2 (+752); chr9:7228
7591-72287646/APBA1 (−344); chr9:74061759-74061787/TRPM3 (−325259), TMEM2 (+322027); chr9:7497882
4-74978858/ZFAND5 (+1322), GDA (+214574); chr9:77113341-77113558/RORB (+1198), TRPM6 (+389186); c
hr9:77113709-77113805/RORB (+1505), TRPM6 (+388879); chr9:77642574-77642635/TRPM6 (−139969), C9or
f95 (+60528); chr9:77643022-77643040/TRPM6 (−140395), C9orf95 (+60102); chr9:79628941-79629207/PRUN
E2 (−108071), FOXB2 (−5497); chr9:79630491-79630544/FOXB2 (−4053); chr9:79635675-79635835/VPS13A
(−156606), FOXB2 (+1184); chr9:79637900-79637977/VPS13A (−154422), FOXB2 (+3368); chr9:80262552-8026
2682/GNA14 (+615); chr9:80850855-80850907/CEP78 (−110); chr9:84303166-84303267/TLE1 (+379); chr9:843
03940-84304028/TLE1 (−388); chr9:84304747-84304776/TLE1 (−1166); chr9:86152372-86152381/FRMD3 (+97
1); chr9:86322953-86322998/AK300656 (−260), UBQLN1 (+192); chr9:86535969-86536018/KIF27 (+348); chr9:
86536415-86536450/KIF27 (−91); chr9:86571709-86571751/C9orf64 (−67); chr9:87285196-87285272/NTRK2
(+1768); chr9:87285533-87285554/NTRK2 (+2078); chr9:87905281-87905324/AGTPBP1 (+451641), NTRK2 (+6
21837); chr9:88137726-88137874/AGTPBP1 (+219144), NTRK2 (+854334); chr9:88357102-88357128/AGTPB
P1 (−171); chr9:89517655-89517860/ZCCHC6 (−548356), GAS1 (+44346); chr9:90559100-90559173/CDK20
(+30558), C9orf79 (+61365); chr9:90691989-90692049/SPIN1 (−311278), CDK20 (−102324); chr9:90748552-9074
8602/SPIN1 (−254720), CDK20 (−158882); chr9:91150765-91150902/C9orf47 (−454944), SPIN1 (+147537); chr9:
91605694-91605781/S1PR3 (−624), C9orf47 (−40); chr9:91925704-91925737/CKS2 (−392); chr9:92099018-920
99113/SEMA4D (−4455); chr9:92218225-92218298/GADD45G (−1665); chr9:92255461-92255525/GADD45G
(+35566); chr9:93601604-93601739/SYK (+37660), AUH (+522534); chr9:93605351-93605452/SYK (+41390), A
UH (+518804); chr9:93925316-93925466/AUH (+198815), SYK (+361379); chr9:94123828-94123862/AUH (+36
1); chr9:94185187-94185224/NFIL3 (+938); chr9:94186190-94186208/NFIL3 (−55); chr9:94868318-94868369/R
OR2 (−155900), SPTLC1 (+9346); chr9:95820962-95821006/SUSD3 (−5); chr9:95821847-95821940/SUSD3 (+9
05); chr9:95845510-95845599/C9orf89 (−12895), SUSD3 (+24566); chr9:95947472-95947484/WNK2 (+266); ch
r9:95947587-95947609/WNK2 (+386); chr9:96030944-96031042/FAM120A (−183180), WNK2 (+83781); chr9:9
6108543-96108600/FAM120A (−105601), WNK2 (+161360); chr9:96588740-96588857/BARX1 (+128809), PHF
2 (+249890); chr9:96671413-96671440/BARX1 (+46181), PHF2 (+332518); chr9:96708116-96708199/BARX1
(+9450), PHF2 (+369249); chr9:96711447-96711534/BARX1 (+6117), PHF2 (+372582); chr9:96714034-967140
68/BARX1 (+3557), PHF2 (+375142); chr9:96714224-96714465/BARX1 (+3263), PHF2 (+375436); chr9:96715
373-96715580/BARX1 (+2131), PHF2 (+376568); chr9:96716331-96716426/BARX1 (+1229), PHF2 (+377470);
chr9:96716824-96716904/BARX1 (+744); chr9:96717428-96717449/BARX1 (+169); chr9:96717807-96717840/
BARX1 (−216); chr9:96721623-96721680/BARX1 (−4044); chr9:96722548-96722727/PTPDC1 (−124073), BARX
1 (−5030); chr9:96723160-96723170/PTPDC1 (−123546), BARX1 (−5557); chr9:96792972-96792999/BARX1 (−7
5378), PTPDC1 (−53725); chr9:97489076-97489090/FBP1 (−87160), C9orf3 (−32848); chr9:97767000-97767073/
C9orf3 (+245106), FANCC (+312954); chr9:98079639-98079695/FANCC (+324); chr9:98111561-98111894/FA
NCC (−31737), PTCH1 (+159103); chr9:98112158-98112343/FANCC (−32260), PTCH1 (+158580); chr9:983154
49-98315536/C9orf102 (−322407), PTCH1 (−44662); chr9:98332508-98332577/C9orf102 (−305357), PTCH1 (−61
712); chr9:98790013-98790083/C9orf102 (+152148), HSD17B3 (+274386); chr9:99181473-99181499/ZNF367
(−817); chr9:99482424-99482468/C9orf21 (−64847), ZNF510 (+57882); chr9:99616671-99616725/ZNF782 (−309);
chr9:99839150-99839218/CTSL2 (−37592), ZNF322 (+122668); chr9:99984058-99984107/C9orf174 (−85827),
ZNF322 (−22231); chr9:100610135-100610200/XPA (−150477), FOXE1 (−5369); chr9:100610817-100611021/F
OXE1 (−4618); chr9:100614000-100614192/FOXE1 (−1441); chr9:100614422-100614441/FOXE1 (−1105); chr9:
100616036-100616158/FOXE1 (+560); chr9:100616883-100616914/FOXE1 (+1362), C9orf156 (+67953); chr9:
100617079-100617251/FOXE1 (+1628), C9orf156 (+67687); chr9:100684498-100684527/C9orf156 (+339); chr
9:100746987-100747056/NANS (−71937), ANP32B (+1533); chr9:100954795-100954854/CORO2A (+131); chr
9:101338126-101338240/TBC1D2 (−320180), GABBR2 (+133296); chr9:101706196-101706312/COL15A1 (+11
6); chr9:101984595-101984672/ALG2 (−388), SEC61B (+64); chr9:102590760-102590859/STX17 (−78105), NR
4A3 (+6673); chr9:102668853-102668892/STX17 (−42); chr9:103235258-103235307/MURC (−105053), C9orf30-
TMEFF1 (+31095); chr9:104248650-104248697/C9orf125 (+801); chr9:104500182-104500207/GRIN3A (+667);
chr9:107689044-107689101/ABCA1 (+1454), NIPSNAP3B (+162622); chr9:108320045-108320100/FKTN (−33
8); chr9:110045476-110045505/RAD23B (−26); chr9:110249659-110249748/KLF4 (+2343), RAD23B (+204187);
chr9:110249939-110250473/KLF4 (+1841), RAD23B (+204689); chr9:110250619-110250630/KLF4 (+1422), R
AD23B (+205108); chr9:110253827-110253904/KLF4 (−1819); chr9:110947154-110947259/KLF4 (−695160), AC
TL7B (+671068); chr9:111929023-111929077/C9orf4 (+521); chr9:111929318-111929339/C9orf4 (+242); chr9:
111929528-111929585/C9orf4 (+14); chr9:112172501-112172594/EPB41L4B (−89527), PTPN3 (+88045); chr9:
112810629-112810659/TXN (+208276), PALM2-AKAP2 (+268067); chr9:113017971-113018040/TXN (+914); c
hr9:113341622-113341679/SVEP1 (+509); chr9:114245430-114245457/OR2K2 (−154731), KIAA0368 (+1581);
chr9:114423605-114423654/UGCG (−235576), DNAJC25 (+29998); chr9:115480459-115480497/C9orf80 (−91);
chr9:115512653-115512715/SNX30 (−450); chr9:116037377-116037422/PRPF4 (−514), CDC26 (+469); chr9:11
6172762-116172926/POLE3 (+185); chr9:116173071-116173088/POLE3 (−51); chr9:116350943-116351042/ZN
F618 (−287569), RGS3 (+143982); chr9:116450232-116450327/ZNF618 (−188282), RGS3 (+243269); chr9:117
266845-117267009/DFNB31 (+809); chr9:119722189-119722227/TRIM32 (+272627), ASTN2 (+455109); chr9:
120507299-120507309/TLR4 (+40844); chr9:122131439-122131496/DBC1 (+271); chr9:122132026-12213205
1/DBC1 (−300); chr9:123639542-123639588/PHF19 (+41); chr9:123690524-123690585/TRAF1 (+896); chr9:12
4062126-124062156/GSN (+62); chr9:124132907-124132982/STOM (−400); chr9:124291875-124292047/DAB2
IP (−37438), GGTA1P (−29655); chr9:124313124-124313185/GGTA1P (−50849), DAB2IP (−16244); chr9:124461
423-124461448/DAB2IP (+132037), TTLL11 (+394449); chr9:124498632-124498691/DAB2IP (+169263), TTLL
11 (+357223); chr9:124981634-124981877/NDUFA8 (−59658), LHX6 (+9335); chr9:124982176-124982244/ND
UFA8 (−60112), LHX6 (+8881); chr9:124990786-124990828/LHX6 (+284); chr9:125675559-125675612/ZBTB6
(+23); chr9:126030352-126030391/STRBP (+483); chr9:126101783-126101846/STRBP (−70960), CRB2 (−16633);
chr9:126135972-126136049/CRB2 (+17563), DENND1A (+556406); chr9:126183104-126183193/CRB2 (+64
701), DENND1A (+509268); chr9:126692085-126692094/DENND1A (+327); chr9:126762209-126762231/DEN
ND1A (−69803), LHX2 (−11669); chr9:126774278-126774459/LHX2 (+480); chr9:126774620-126775014/LHX2
(+928); chr9:126775183-126775262/NEK6 (−244973), LHX2 (+1334); chr9:126776099-126776270/NEK6 (−2440
11), LHX2 (+2296); chr9:126777816-126777973/NEK6 (−242301), LHX2 (+4006); chr9:126778239-126778358/
NEK6 (−241897), LHX2 (+4410); chr9:126779162-126779292/NEK6 (−240969), LHX2 (+5338); chr9:126780185-
126780281/NEK6 (−239963), LHX2 (+6344); chr9:127215590-127215678/GPR144 (+2211), NR5A1 (+54065); c
hr9:127258042-127258187/NR5A1 (+11584), GPR144 (+44692); chr9:127265625-127265692/NR5A1 (+4040),
GPR144 (+52236); chr9:127266588-127266628/NR5A1 (+3091), GPR144 (+53185); chr9:127266847-1272668
65/NR5A1 (+2843), GPR144 (+53433); chr9:128003043-128003087/HSPA5 (+601); chr9:128003311-12800335
0/HSPA5 (+335); chr9:128469279-128469311/MAPKAP1 (+218); chr9:128509666-128509705/PBX3 (+69); chr9:
128651564-128651649/FAM125B (−437516), PBX3 (+141990); chr9:128985404-128985465/FAM125B (−10368
8), PBX3 (+475818); chr9:129262179-129262308/LMX1B (−114478), FAM125B (+173121); chr9:129263022-12
9263128/LMX1B (−113647), FAM125B (+173952); chr9:129276933-129276961/LMX1B (−99775), FAM125B (+1
87824); chr9:129373038-129373250/LMX1B (−3578); chr9:129377363-129377452/LMX1B (+686); chr9:129377
636-129377772/LMX1B (+982); chr9:129377960-129378024/ZBTB43 (−189293), LMX1B (+1270); chr9:1293810
84-129381298/ZBTB43 (−186094), LMX1B (+4469); chr9:129381529-129381591/ZBTB43 (−185725), LMX1B
(+4838); chr9:129381937-129382041/ZBTB43 (−185296), LMX1B (+5267); chr9:129386197-129386429/ZBTB43
(−180972), LMX1B (+9591); chr9:129387749-129387847/ZBTB43 (−179487), LMX1B (+11076); chr9:129388754-
129388816/ZBTB43 (−178500), LMX1B (+12063); chr9:129412866-129412923/ZBTB43 (−154390), LMX1B (+36
173); chr9:129485772-129486023/ZBTB43 (−81387), LMX1B (+109176); chr9:130330605-130330630/FAM129B
(+737); chr9:130370668-130370712/STXBP1 (−3796); chr9:130497262-130497310/TOR2A (+342); chr9:13054
5434-130545531/SH2D3C (−4435), CDK9 (−2822); chr9:130564950-130565008/FPGS (−175); chr9:130616753-
130616856/ENG (+242); chr9:130689668-130689741/ST6GALNAC4 (−10400), PIP5KL1 (+3371); chr9:1306901
67-130690197/ST6GALNAC4 (−10877), PIP5KL1 (+2894); chr9:130768366-130768475/DPM2 (−67658), NAIF1
(+61178); chr9:130890801-130890882/PTGES2 (−368), LOC389791 (+34); chr9:131013068-131013198/GOLG
A2 (+25135), DNM1 (+47470); chr9:131013355-131013399/GOLGA2 (+24891), DNM1 (+47714); chr9:1312672
26-131267275/GLE1 (+280); chr9:131451341-131451386/SET (−145); chr9:131451914-131451950/SET (+423);
chr9:131465725-131465810/PKN3 (+966); chr9:131592046-131592075/C9orf114 (+39); chr9:131709800-1317
09841/NUP188 (−156), DOLK (+191); chr9:131863108-131863235/CRAT (+9898), DOLPP1 (+19789); chr9:131
872845-131872856/PPP2R4 (−377), CRAT (+219); chr9:131940546-131940585/METTL11A (−447869), PPP2R4
(+67338); chr9:132099434-132099658/METTL11A (−288889), PPP2R4 (+226318); chr9:132113495-13211354
8/METTL11A (−274913), PPP2R4 (+240294); chr9:132175579-132175603/METTL11A (−212844), PPP2R4 (+30
2363); chr9:132200804-132200890/METTL11A (−187588), PPP2R4 (+327619); chr9:132312568-132312620/M
ETTL11A (−75841), PPP2R4 (+439366); chr9:132372653-132372704/METTL11A (−15756), PPP2R4 (+499451);
chr9:132382363-132382432/METTL11A (−6037), PPP2R4 (+509170); chr9:132650763-132650997/USP20 (+5
3184), FNBP1 (+154593); chr9:132804662-132804693/FNBP1 (+795); chr9:132804979-132805028/FNBP1 (+4
69); chr9:133027814-133027870/AK074396 (−277827), NCS1 (+92985); chr9:133028170-133028194/AK07439
6 (−277487), NCS1 (+93325); chr9:133308747-133308769/ASS1 (−11336), AK074396 (+3089); chr9:133320834-
133320884/ASS1 (+765); chr9:133534534-133534580/PRDM12 (−5424), FUBP3 (+79597); chr9:133535561-13
3535706/PRDM12 (−4347); chr9:133535934-133535971/PRDM12 (−4028); chr9:133536120-133536149/PRDM1
2 (−3846); chr9:133539424-133539510/PRDM12 (−514); chr9:133815477-133815528/FIBCD1 (−1264); chr9:133
815671-133815730/FIBCD1 (−1462); chr9:134114159-134114279/PPAPDC3 (−50862), NUP214 (+113238); chr
9:134128101-134128239/PPAPDC3 (−36911), NUP214 (+127189); chr9:134131738-134131797/PPAPDC3 (−33
313), NUP214 (+130787); chr9:134148647-134148713/PPAPDC3 (−16401), NUP214 (+147699); chr9:1341513
72-134151449/PPAPDC3 (−13670), NUP214 (+150430); chr9:134158196-134158229/PPAPDC3 (−6868), NUP2
14 (+157232); chr9:134406368-134406406/UCK1 (+275); chr9:134420710-134420759/UCK1 (−14073), RAPGE
F1 (+164494); chr9:134430007-134430124/UCK1 (−23404), RAPGEF1 (+155163); chr9:134430259-134430482/
UCK1 (−23709), RAPGEF1 (+154858); chr9:134465863-134465963/UCK1 (−59251), RAPGEF1 (+119316); chr9:
134609056-134609145/RAPGEF1 (−23872), MED27 (+346173); chr9:134955018-134955069/MED27 (+230); c
hr9:135037288-135037333/NTNG2 (−23); chr9:135038264-135038352/NTNG2 (+974); chr9:135039740-135039
939/NTNG2 (+2506), SETX (+190532); chr9:135230423-135230447/SETX (−63); chr9:135285865-135285880/T
TF1 (−3635); chr9:135406874-135406975/TTF1 (−124687), BARHL1 (−51068); chr9:135455244-135455287/BAR
HL1 (−2727); chr9:135456024-135456079/BARHL1 (−1941); chr9:135456205-135456234/BARHL1 (−1773); chr9:
135458440-135458456/BARHL1 (+455); chr9:135462078-135462647/GTF3C4 (−83365), BARHL1 (+4370); chr9:
135466065-135466117/GTF3C4 (−79637), BARHL1 (+8098); chr9:135545627-135545644/GTF3C4 (−92), DDX
31 (+152); chr9:135545824-135545857/DDX31 (−53), GTF3C4 (+113); chr9:136024969-136025000/RALGDS
(−28424), OBP2B (+59643); chr9:136150135-136150292/ABO (+416); chr9:136214785-136214803/RPL7A (−275),
MED22 (+178); chr9:136243049-136243087/C9orf96 (−216), SURF4 (−98); chr9:136294774-136294864/C9orf7
(−30268), ADAMTS13 (+7699); chr9:136294968-136294999/C9orf7 (−30103), ADAMTS13 (+7864); chr9:13635
3075-136353125/SLC2A6 (−8824), TMEM8C (+36968); chr9:136399390-136399431/ADAMTSL2 (−564); chr9:13
6444239-136444418/FAM163B (+1039), ADAMTSL2 (+44354); chr9:136451015-136451046/DBH (−50454), FA
M163B (−5663); chr9:136474224-136474260/FAM163B (−28874), DBH (−27243); chr9:136474391-136474431/F
AM163B (−29043), DBH (−27074); chr9:136474592-136474724/FAM163B (−29290), DBH (−26827); chr9:136567
554-136567711/SARDH (+35846), DBH (+66148); chr9:136710244-136710348/SARDH (−106817), VAV2 (+147
150); chr9:136771536-136771563/SARDH (−168071), VAV2 (+85896); chr9:136857480-136857626/VAV2 (−107);
chr9:136930623-136930696/VAV2 (−73214), BRD3 (+2481); chr9:137028717-137028754/RXRA (−189580), W
DR5 (+27526); chr9:137125004-137125088/RXRA (−93270), WDR5 (+123836); chr9:137156002-137156049/RX
RA (−62290), WDR5 (+154816); chr9:137185845-137185895/RXRA (−32446), WDR5 (+184660); chr9:13721875
7-137218787/RXRA (+456); chr9:137230495-137230543/COL5A1 (−303133), RXRA (+12203); chr9:137288499-
137288599/COL5A1 (−245103), RXRA (+70233); chr9:137297212-137297335/COL5A1 (−236378), RXRA (+78
958); chr9:137347952-137348022/COL5A1 (−185665), RXRA (+129671); chr9:137378545-137378637/COL5A1
(−155061), RXRA (+160275); chr9:137533967-137534065/COL5A1 (+364); chr9:137662852-137663009/FCN2
(−109727), COL5A1 (+129279); chr9:137820780-137820912/OLFM1 (−146243), FCN1 (−11040); chr9:137936301-
137936393/FCN1 (−126541), OLFM1 (−30742); chr9:137967113-137967132/OLFM1 (+34); chr9:137967369-13
7967465/OLFM1 (+328); chr9:137967651-137967688/OLFM1 (+581); chr9:137980144-137980216/PPP1R26
(−391468), OLFM1 (+13091); chr9:137990396-137990442/PPP1R26 (−381229), OLFM1 (+23330); chr9:1381360
69-138136084/PPP1R26 (−235571), OLFM1 (+168988); chr9:138391511-138391563/MRPS2 (−946); chr9:1384
76818-138476901/PAEP (+23256), GLT6D1 (+54526); chr9:138606461-138606510/KCNT1 (+12455), CAMSA
P1 (+192519); chr9:138606774-138606820/KCNT1 (+12766), CAMSAP1 (+192208); chr9:138799677-1387997
40/CAMSAP1 (−704); chr9:138818910-138819032/CAMSAP1 (−19966), UBAC1 (+34255); chr9:138852883-138
852950/UBAC1 (+309); chr9:138987157-138987167/NACC2 (−31); chr9:138990657-138990811/NACC2 (−3603);
chr9:138999194-138999263/NACC2 (−12098), LHX3 (+95775); chr9:139002564-139002798/NACC2 (−15550),
LHX3 (+92323); chr9:139010698-139010718/NACC2 (−23577), LHX3 (+84296); chr9:139014599-139014645/N
ACC2 (−27491), LHX3 (+80382); chr9:139085351-139085372/NACC2 (−98231), LHX3 (+9642); chr9:139085828-
139085985/NACC2 (−98776), LHX3 (+9097); chr9:139090552-139090586/NACC2 (−103438), LHX3 (+4435); ch
r9:139090742-139091071/NACC2 (−103776), LHX3 (+4097); chr9:139091525-139091706/NACC2 (−104485), L
HX3 (+3388); chr9:139093719-139093734/NACC2 (−106596), LHX3 (+1277); chr9:139093923-139094021/NAC
C2 (−106841), LHX3 (+1032); chr9:139095131-139095165/LHX3 (−144), LHX3 (−144); chr9:139137703-1391377
31/QSOX2 (−30); chr9:139221115-139221229/GPSM1 (−760); chr9:139258023-139258110/DNLZ (+174); chr9:1
39305433-139305474/SDCCAG3 (−400), PMPCA (+338); chr9:139424551-139424589/SEC16A (−47063), NOT
CH1 (+15668); chr9:139425228-139425355/SEC16A (−47785), NOTCH1 (+14946); chr9:139427226-139427308/
SEC16A (−49760), NOTCH1 (+12971); chr9:139428489-139428569/SEC16A (−51022), NOTCH1 (+11709); chr
9:139440038-139440052/NOTCH1 (+193); chr9:139472838-139472898/EGFL7 (−87356), NOTCH1 (−32630); c
hr9:139481576-139481634/EGFL7 (−78619), NOTCH1 (−41367); chr9:139482422-139482443/EGFL7 (−77791),
NOTCH1 (−42195); chr9:139482731-139482817/EGFL7 (−77450), NOTCH1 (−42536); chr9:139491049-1394911
07/EGFL7 (−69146), NOTCH1 (−50840); chr9:139494626-139494723/EGFL7 (−65549), NOTCH1 (−54437); chr9:
139498556-139498630/EGFL7 (−61631), NOTCH1 (−58355); chr9:139514305-139514341/NOTCH1 (−74085), E
GFL7 (−45901); chr9:139522722-139522765/NOTCH1 (−82506), EGFL7 (−37480); chr9:139522914-139522979/
NOTCH1 (−82709), EGFL7 (−37277); chr9:139539834-139539967/NOTCH1 (−99663), EGFL7 (−20323); chr9:13
9540411-139540462/NOTCH1 (−100199), EGFL7 (−19787); chr9:139540800-139540894/NOTCH1 (−100609), E
GFL7 (−19377); chr9:139541503-139541552/NOTCH1 (−101290), EGFL7 (−18696); chr9:139548352-139548395/
NOTCH1 (−108136), EGFL7 (−11850); chr9:139552909-139552982/NOTCH1 (−112708), EGFL7 (−7278); chr9:1
39553136-139553722/NOTCH1 (−113191), EGFL7 (−6795); chr9:139553876-139553911/NOTCH1 (−113656), E
GFL7 (−6330); chr9:139555090-139555133/NOTCH1 (−114874), EGFL7 (−5112); chr9:139559649-139559749/E
GFL7 (−525); chr9:139560192-139560220/EGFL7 (−18); chr9:139560801-139560828/EGFL7 (+591); chr9:1395
81917-139581927/AGPAT2 (−11); chr9:139685772-139685800/TMEM141 (+9); chr9:139694764-139694827/C9
orf86 (−7396), TMEM141 (+9019); chr9:139716076-139716246/PHPT1 (−27095), C9orf86 (+13969); chr9:13973
8482-139738522/PHPT1 (−4754); chr9:139738991-139739024/PHPT1 (−4248); chr9:139739133-139739447/PH
PT1 (−3966); chr9:139740229-139740338/PHPT1 (−2972); chr9:139740650-139740674/PHPT1 (−2594); chr9:13
9741016-139741046/PHPT1 (−2225); chr9:139741377-139741690/PHPT1 (−1722); chr9:139743886-139743923/
MAMDC4 (−2914), PHPT1 (+649); chr9:139879796-139879955/LCNL1 (+2431), CLIC3 (+11148); chr9:1398803
38-139880471/LCNL1 (+2960), CLIC3 (+10619); chr9:139892470-139892512/CLIC3 (−1467); chr9:140023870-1
40023901/DPP7 (−14691), GRIN1 (−9723); chr9:140024771-140024786/DPP7 (−15584), GRIN1 (−8830); chr9:14
0024919-140024956/DPP7 (−15743), GRIN1 (−8671); chr9:140033491-140033618/GRIN1 (−54); chr9:14005109
7-140051219/LRRC26 (+13333), GRIN1 (+17549); chr9:140057963-140058016/LRRC26 (+6501), GRIN1 (+243
81); chr9:140095037-140095052/TPRN (+118); chr9:140100042-140100069/TPRN (−4893), NDOR1 (−63), TME
M203 (+34); chr9:140117157-140117171/RNF224 (−4854), RNF208 (−1389); chr9:140117326-140117401/RNF2
24 (−4654), RNF208 (−1589); chr9:140172066-140172152/C9orf167 (−171); chr9:140172574-140172697/C9orf1
67 (+356); chr9:140172806-140172875/C9orf167 (+561); chr9:140173051-140173096/C9orf167 (+794); chr9:14
0189360-140189390/NRARP (+7328), C9orf167 (+17095); chr9:140210909-140210943/NRARP (−14223), EXD
3 (+106788); chr9:140329181-140329283/ENTPD8 (+6669), NOXA1 (+11385); chr9:140356218-140356341/NE
LF (−2494); chr9:140356817-140356849/NELF (−3047); chr9:140513092-140513120/EHMT1 (−338); chr9:14077
1908-140771965/CACNA1B (−304); chr9:140772594-140772756/CACNA1B (+434); chrX:3263826-3263918/MX
RA5 (+812); chrX:3265013-3265150/MXRA5 (−398); chrX:6145720-6145835/NLGN4X (+928); chrX:7895049-78
95084/PNPLA4 (+713); chrX:8699058-8699110/KAL1 (+1143), VCX3B (+266213); chrX:8699762-8699940/KAL
1 (+376); chrX:9733189-9733221/GPR143 (+800); chrX:9733437-9733845/GPR143 (+364); chrX:9753825-975
3862/SHROOM2 (−652); chrX:9983733-9983762/CLCN4 (−141237), SHROOM2 (+229252); chrX:10126796-101
26824/CLCN4 (+1825), MID1 (+724999); chrX:11445723-11445829/AMELX (+134243), ARHGAP6 (+238045);
chrX:11682697-11682722/ARHGAP6 (+1111), AMELX (+371177); chrX:11683545-11683583/ARHGAP6 (+257);
chrX:11683790-11683837/ARHGAP6 (+7); chrX:11776799-11776820/MSL3 (+532); chrX:12156658-12156679/
FRMPD4 (+84); chrX:12156794-12156857/FRMPD4 (+241); chrX:14891612-14891625/FANCB (−435), MOSPD
2 (+92); chrX:16730140-16730152/CTPS2 (+913); chrX:16889167-16889207/RBBP7 (−1209); chrX:17393425-1
7393450/NHS (−105); chrX:17395538-17395567/SCML1 (−360039), NHS (+2010); chrX:17673759-17673820/S
CML1 (−81802), NHS (+280247); chrX:17674307-17674403/SCML1 (−81237), NHS (+280812); chrX:17756494-
17756567/SCML1 (+939); chrX:18372695-18372723/SCML2 (+135); chrX:18373396-18373543/SCML2 (−626);
chrX:18904855-18904959/PHKA2 (+97573), PPEF1 (+195862); chrX:19140060-19140082/GPR64 (+684); chrX:
20284812-20284827/RPS6KA3 (−70); chrX:21676579-21676606/SMPX (+99685), CNKSR2 (+284057); chrX:21
959621-21959676/SMS (+934); chrX:23353086-23353124/PTCHD1 (+120); chrX:23685674-23685694/PRDX4
(+39); chrX:25021580-25021610/ARX (+12470), POLA1 (+309531); chrX:25022843-25022892/ARX (+11197), P
OLA1 (+310804); chrX:25025271-25025306/ARX (+8776), POLA1 (+313225); chrX:25025518-25025586/ARX
(+8513), POLA1 (+313488); chrX:25030116-25030212/ARX (+3901), POLA1 (+318100); chrX:25033674-250338
20/ARX (+318); chrX:25034013-25034132/ARX (−8); chrX:25041080-25041121/ARX (−7036); chrX:30327000-30
327058/NR0B1 (+466); chrX:30327629-30327658/NR0B1 (−149); chrX:30671055-30671152/GK (−372); chrX:30
907511-30907521/TAB3 (−5); chrX:34675056-34675111/TMEM47 (+321); chrX:36975654-36975696/PRRG1
(−232853), CXorf59 (+910622); chrX:36976018-36976074/PRRG1 (−232482), CXorf59 (+910993); chrX:37431393-
37431414/LANCL3 (+582); chrX:37706679-37706706/DYNLT3 (+196); chrX:38079898-38080125/SRPX (+165);
chrX:38080411-38080468/SRPX (−263); chrX:38421178-38421231/TSPAN7 (+474); chrX:38663094-3866312
3/MID1IP1 (+2424); chrX:38663725-38663772/MID1IP1 (+3064); chrX:38663915-38663969/MID1IP1 (+3257); c
hrX:39548471-39548640/BCOR (+408163), MID1IP1 (+887871); chrX:39680564-39680630/BCOR (+276122); c
hrX:39864973-39865285/BCOR (+91590); chrX:39868924-39869045/BCOR (+87734); chrX:39871760-3987177
8/BCOR (+84950); chrX:39943293-39943368/BCOR (+13388); chrX:39949467-39949535/BCOR (+7218); chrX:
39949799-39949948/BCOR (+6845); chrX:39953560-39953710/BCOR (+3084); chrX:39956856-39957026/BC
OR (−222); chrX:39957904-39958064/BCOR (−1265); chrX:39959507-39959550/BCOR (−2810); chrX:39967941-
39967970/ATP6AP2 (−472260), BCOR (−11237); chrX:40005220-40005243/ATP6AP2 (−434984), BCOR (−4851
3); chrX:40027370-40027644/ATP6AP2 (−412709), BCOR (−70788); chrX:40029077-40029114/ATP6AP2 (−411
120), BCOR (−72377); chrX:40031061-40031175/ATP6AP2 (−409098), BCOR (−74399); chrX:40033419-400335
32/ATP6AP2 (−406740), BCOR (−76757); chrX:40035739-40035852/ATP6AP2 (−404420), BCOR (−79077); chrX:
41782385-41782420/CASK (−116); chrX:41782552-41782573/CASK (−276); chrX:41782895-41782917/CASK
(−619); chrX:43514557-43514583/MAOA (−839); chrX:45711218-45711231/CXorf36 (−651079), ZNF673 (−595399);
chrX:46618307-46618326/SLC9A7 (+155); chrX:46618686-46618721/SLC9A7 (−232); chrX:46697006-46697
035/RP2 (+674); chrX:47092632-47092722/USP11 (+363); chrX:47230642-47230689/ZNF157 (+667); chrX:473
42460-47342497/ZNF41 (−134); chrX:47372725-47372743/ARAF (−47782), ZNF41 (−30389); chrX:47433504-47
433528/TIMP1 (−8174), ARAF (+13000); chrX:47433807-47433827/TIMP1 (−7873), ARAF (+13301); chrX:47433
972-47434030/TIMP1 (−7689), ARAF (+13485); chrX:48367202-48367222/PORCN (−960); chrX:48367450-4836
7473/PORCN (−710); chrX:48690515-48690671/ERAS (+3310), PCSK1N (+3367); chrX:48748805-48748923/P
CSK1N (−54904), PQBP1 (−6331); chrX:48749176-48749266/PCSK1N (−55261), PQBP1 (−5974); chrX:4881460
7-48814634/OTUD5 (+272); chrX:48911157-48911189/TFE3 (−10183), WDR45 (+26391); chrX:48931468-4893
1483/TFE3 (−30486), WDR45 (+6088); chrX:48979986-48979998/GPKOW (+87); chrX:49022631-49022667/GP
KOW (−42570), PLP2 (−5535); chrX:50212431-50212475/DGKK (+1268), CCNB3 (+184911); chrX:50557041-50
557074/SHROOM4 (−14); chrX:51138757-51138798/NUDT10 (+63695), NUDT11 (+100681); chrX:51139418-5
1139480/NUDT10 (+64366), NUDT11 (+100010); chrX:51239177-51239210/NUDT11 (+265); chrX:51453590-5
1453627/NUDT11 (−214150), GSPT2 (−32872); chrX:51454008-51454028/NUDT11 (−214559), GSPT2 (−32463);
chrX:51454190-51454236/NUDT11 (−214754), GSPT2 (−32268); chrX:51486665-51486869/GSPT2 (+286); chr
X:53461354-53461371/HSD17B10 (−40); chrX:53710771-53710827/HSD17B10 (−249476), HUWE1 (+2874); chr
X:54555996-54556126/GNL3L (−583); chrX:55187440-55187469/ALAS2 (−129958), MTRNR2L10 (+21489); chr
X:55516223-55516315/USP51 (−638); chrX:64626522-64626597/ZC4H2 (−430147), ZC3H12B (−82055); chrX:6
4627144-64627282/ZC4H2 (−430800), ZC3H12B (−81402); chrX:64914349-64914480/MSN (+26904), VSIG4
(+345552); chrX:65858672-65858788/AR (−905144), EDA2R (−22858); chrX:66766143-66766178/AR (+2287), OP
HN1 (+887138); chrX:67718683-67718715/YIPF6 (+75); chrX:67906221-67906253/EFNB1 (−142603), STARD8
(+38726); chrX:68348499-68348639/PJA1 (+36796), EFNB1 (+299729); chrX:68724743-68724763/FAM155B
(−325); chrX:68758315-68758592/EDA (−77457), FAM155B (+33376); chrX:69353384-69353400/IGBP1 (+74); ch
rX:69654438-69654477/DLG3 (−10247), GDPD2 (+11577); chrX:69665133-69665158/DLG3 (+441); chrX:69675
020-69675045/DLG3 (+10328), TEX11 (+453534); chrX:70473966-70473999/ZMYM3 (+55); chrX:71131379-71
131398/CXCR3 (−293022), PIN4 (−270137); chrX:71351658-71351726/CXCR3 (−513325), PIN4 (−49834); chrX:7
1524855-71524952/CITED1 (+860); chrX:71996959-71996981/DMRTC1 (−67906), PHKA1 (−62941); chrX:7258
1694-72581822/NAP1L2 (−147048), CDX4 (−85332); chrX:73641988-73642120/SLC16A2 (+969); chrX:7364263
2-73642691/SLC16A2 (+1577), RLIM (+191799); chrX:73756115-73756192/RLIM (+78307), SLC16A2 (+11506
9); chrX:74742806-74742851/ZDHHC15 (+508); chrX:82763684-82763735/POU3F4 (+441); chrX:82765601-82
765733/CYLC1 (−350503), POU3F4 (+2398); chrX:90689625-90689701/PABPC5 (+66); chrX:90689856-906900
63/PABPC5 (+363); chrX:92928395-92928507/NAP1L3 (+231); chrX:95940292-95940353/DIAPH2 (+661); chrX:
99663489-99663511/PCDH19 (+1771); chrX:99663743-99663751/PCDH19 (+1524); chrX:99663910-99663923/
PCDH19 (+1354); chrX:99664067-99664158/PCDH19 (+1158); chrX:99664897-99664907/PCDH19 (+369); chr
X:99665390-99665418/PCDH19 (−133); chrX:99665939-99665964/PCDH19 (−681); chrX:100446451-10044648
7/DRP2 (−28464), CENPI (+91671); chrX:101397327-101397372/TCEAL6 (+38); chrX:101906121-101906180/G
PRASP1 (−143); chrX:101906926-101906974/GPRASP1 (+656); chrX:102470018-102470054/BEX4 (+16); chrX:
102565927-102565962/BEX2 (−62); chrX:102862751-102862801/TCEAL3 (−58); chrX:103216979-103217122/T
MSB15B (+457); chrX:103217346-103217372/TMSB15B (+765); chrX:103217537-103217589/TMSB15B (+969);
chrX:103401637-103401656/MCART6 (+61); chrX:105066260-105066291/NRK (−260); chrX:105066413-1050
66435/NRK (−112); chrX:105066911-105066939/NRK (+389); chrX:106242935-106243004/MORC4 (+504); chr
X:106693124-106693243/NUP62CL (−243514), KIAA1817 (−150451); chrX:106750341-106750412/NUP62CL
(−300707), KIAA1817 (−93258); chrX:106960078-106960138/TSC22D3 (+58909), PRPS1 (+88454); chrX:107018
421-107018462/TSC22D3 (+575); chrX:107978667-107978899/IRS4 (+824); chrX:108868110-108868220/KCN
E1L (+228); chrX:108868406-108868440/KCNE1L (−30); chrX:109560954-109561100/AMMECR1 (+353); chrX:
109561464-109561484/AMMECR1 (−94); chrX:110038953-110039006/CHRDL1 (+96); chrX:110039255-110039
268/CHRDL1 (−186); chrX:110342372-110342425/CHRDL1 (−303323), PAK3 (−23906); chrX:110924420-110924
466/ALG13 (+97); chrX:113818984-113819094/HTR2C (+488); chrX:114468409-114468427/LUZP4 (−55874), R
BMXL3 (+44455); chrX:117250913-117250942/WDR44 (−229108), KLHL13 (−131552); chrX:117480176-117480
245/WDR44 (+175); chrX:118107618-118107646/LONRF3 (−1081); chrX:118369944-118369983/PGRMC1 (−24
7); chrX:118370379-118370460/PGRMC1 (+209); chrX:119444866-119445000/FAM70A (+458); chrX:1223176
50-122317699/GRIA3 (−421); chrX:122318423-122318507/GRIA3 (+369); chrX:123094177-123094335/STAG2
(−219); chrX:124337875-124337916/ODZ1 (−240230); chrX:124338094-124338138/ODZ1 (−240450); chrX:1243
39910-124339938/ODZ1 (−242258); chrX:125686650-125686665/DCAF12L1 (+184); chrX:128788806-1287888
19/APLN (+120); chrX:128977540-128977563/ZDHHC9 (+358); chrX:129087399-129087439/BCORL1 (−51745),
UTP14A (+47322); chrX:129114786-129114835/BCORL1 (−24353), UTP14A (+74714); chrX:129300015-1293
00060/AIFM1 (−177); chrX:129402413-129402467/ZNF280C (+482); chrX:129473604-129473636/SLC25A14
(−427); chrX:130192341-130192438/ARHGAP36 (+174); chrX:130202015-130202098/ARHGAP36 (+9841), IGSF
1 (+221346); chrX:130216173-130216204/ARHGAP36 (+23973), IGSF1 (+207214); chrX:131623698-13162371
8/MBNL3 (−49366), HS6ST2 (+471715); chrX:132091719-132091736/MBNL3 (−517386), HS6ST2 (+3695); chrX:
132547835-132547884/TFDP3 (−195484), GPC4 (+1345); chrX:132548635-132548690/GPC4 (+542); chrX:133
119761-133119817/GPC3 (−116); chrX:133306212-133306237/PHF6 (−201117), GPC3 (−186552); chrX:133306
583-133306620/PHF6 (−200740), GPC3 (−186929); chrX:133306856-133306878/PHF6 (−200475), GPC3 (−1871
94); chrX:133684957-133685022/HPRT1 (+90815), PLAC1 (+107523); chrX:135229044-135229083/FHL1 (−495);
chrX:135332989-135333101/MAP7D3 (+693); chrX:136115948-136116139/GPR101 (−2211); chrX:13611632
7-136116386/GPR101 (−2524); chrX:136509390-136509450/GPR101 (−395587), ZIC3 (−138926); chrX:1366278
97-136628107/GPR101 (−514169), ZIC3 (−20344); chrX:136631467-136631558/GPR101 (−517680), ZIC3 (−168
33); chrX:136632079-136632148/GPR101 (−518281), ZIC3 (−16232); chrX:136632957-136632994/GPR101 (−51
9143), ZIC3 (−15370); chrX:136645916-136646040/ZIC3 (−2368); chrX:136648090-136648166/ZIC3 (−218); chr
X:136648820-136648867/ZIC3 (+498); chrX:136649338-136649414/ZIC3 (+1030); chrX:136649557-136649579/
ZIC3 (+1222); chrX:136650718-136650779/ZIC3 (+2403); chrX:136651276-136651332/ZIC3 (+2958); chrX:136
656246-136656522/ZIC3 (+8038); chrX:136657262-136657339/ZIC3 (+8955); chrX:137793294-137793405/FG
F13 (+493835); chrX:138285260-138285344/FGF13 (+1883); chrX:138287200-138287355/FGF13 (−93); chrX:1
38774357-138774473/MCF2 (+15966), F9 (+161520); chrX:139014609-139014762/ATP11C (−100239), CXorf6
6 (+32991); chrX:139015385-139015429/ATP11C (−100960), CXorf66 (+32270); chrX:139521645-139521696/C
Xorf66 (−473994), SOX3 (+65554); chrX:139586417-139586439/SOX3 (+797); chrX:139587051-139587162/SO
X3 (+118); chrX:139846939-139846982/SOX3 (−259736), SPANXB2 (−237795); chrX:140270914-140270964/L
DOC1 (+371); chrX:141102956-141103026/MAGEC1 (+111349), MAGEC2 (+190085); chrX:142721540-14272
1812/SLITRK4 (+2250); chrX:142722143-142722190/SLITRK4 (+1759); chrX:142722403-142722426/SLITRK4
(+1511); chrX:144899618-144899683/SLITRK2 (−3215); chrX:144899907-144899957/SLITRK2 (−2934); chrX:14
4903097-144903114/SLITRK2 (+240); chrX:147581935-147582070/AFF2 (−136); chrX:147583219-147583272/
AFF2 (+1107); chrX:149736752-149736963/MTM1 (−189); chrX:149737608-149737645/MTM1 (+580); chrX:149
861809-149861833/MTMR1 (−48); chrX:149878992-149879083/MTMR1 (+17169), CD99L2 (+188251); chrX:15
0067686-150067724/CD99L2 (−416); chrX:150345878-150345898/GPR50 (+832); chrX:150565506-150565572/
VMA21 (−118); chrX:150863505-150863564/PRRG3 (−195); chrX:150864007-150864055/PRRG3 (+301); chrX:1
51142689-151142721/GABRE (+446); chrX:151143347-151143366/GABRE (−206); chrX:151806299-15180635
1/GABRQ (−312); chrX:151806618-151806637/GABRQ (−9); chrX:151999273-151999305/NSDHL (−222), CETN
2 (+12); chrX:151999444-151999482/CETN2 (−162), NSDHL (−48); chrX:152224659-152224688/PNMA3 (−92); c
hrX:152586915-152586939/MAGEA1 (−100811), ZNF275 (−12686); chrX:152677013-152677047/ZFP92 (−6751),
ZNF275 (+77417); chrX:152677234-152677257/ZFP92 (−6535), ZNF275 (+77633); chrX:152735875-15273594
5/HAUS7 (+693); chrX:152740380-152740448/HAUS7 (−3811); chrX:152783261-152783291/ATP2B3 (−18304),
BGN (+22929); chrX:152783454-152783578/ATP2B3 (−18064), BGN (+23169); chrX:152783791-152783820/AT
P2B3 (−17774), BGN (+23459); chrX:152864406-152864438/FAM58A (+210); chrX:152908187-152908196/DU
SP9 (+295); chrX:152928030-152928053/PNCK (+11774), DUSP9 (+20145); chrX:152939271-152939323/PNC
K (+519); chrX:152990140-152990172/BCAP31 (−607), ABCD1 (−167); chrX:153059574-153059616/SSR4 (−35),
IDH3G (+372); chrX:153059829-153059996/IDH3G (+54), SSR4 (+283); chrX:153060545-153060619/IDH3G
(−615), SSR4 (+952); chrX:153084393-153084409/IDH3G (−24434), PDZD4 (+11602); chrX:153094523-1530945
63/IDH3G (−34576), PDZD4 (+1460); chrX:153094952-153095012/IDH3G (−35015), PDZD4 (+1021); chrX:1530
96352-153096414/PDZD4 (−380); chrX:153096582-153096660/PDZD4 (−618); chrX:153144833-153144922/L1C
AM (−3479); chrX:153151733-153151765/AVPR2 (−18679), L1CAM (−10350); chrX:153152113-153152173/AVP
R2 (−18285), L1CAM (−10744); chrX:153171727-153171793/AVPR2 (+1332), ARHGAP4 (+19954); chrX:153207
031-153207052/NAA10 (−6574), RENBP (+3190); chrX:153236213-153236278/TMEM187 (−1745), HCFC1 (+57
3); chrX:153237598-153237630/HCFC1 (−795), TMEM187 (−377); chrX:153238385-153238445/HCFC1 (−1596),
TMEM187 (+424); chrX:153285077-153285127/IRAK1 (+240); chrX:153362964-153362976/MECP2 (+218); chr
X:153598874-153598901/FLNA (+4118), TKTL1 (+74861); chrX:153600042-153600152/FLNA (+2909), TKTL1
(+76070); chrX:153607708-153607763/FLNA (−4730), EMD (+139); chrX:153608083-153608128/EMD (+509); c
hrX:153665764-153665781/GDI1 (+514); chrX:153718738-153718750/UBL4A (−3812), SLC10A3 (+258); chrX:1
54033868-154033915/MPP1 (−90); chrY:9116739-9116821/TSPY4 (−58339); chrY:14532761-14532794/USP9Y
(−280382); chrY:14533210-14533221/USP9Y (−279944); chrY:21239718-21239798/CD24 (−85053), KDM5D (+6
67067); chrY:27242332-27242362/CDY1 (−525917), BPY2 (−44096)

1. A method for detecting the presence of a target nucleic acid in a mixture of nucleic acids comprising:
performing methylation haplotype analysis on a sample comprising a plurality of nucleic acids; and
determining whether said sample includes a methylation haplotype indicative of the presence of said target nucleic acid.

2. The method of claim 1, wherein said methylation haplotype analysis comprises determining the combinatorial methylation status of a plurality of methylation sites in a nucleic acid molecule.

3. The method of claim 2, wherein said plurality of methylation sites comprises at least 2, at least 3, at least 4, at least 5, at least 10, at least 20, at least 40, at least 50, at least 100, at least 200, at least 300, at least 400, at least 500 or more than 500 methylation sites indicative of the presence of the target nucleic acid in the sample.

4. (canceled)

5. (canceled)

6. (canceled)

7. (canceled)

8. (canceled)

9. The method of claim 2, wherein said plurality of methylation sites are located within a region on a single nucleic acid molecule.

10. The method of claim 9, wherein said region is about 5 bp to about 500 bp.

11. (canceled)

12. (canceled)

13. (canceled)

14. (canceled)

15. (canceled)

16. (canceled)

17. (canceled)

18. (canceled)

19. The method of claim 1, comprising determining whether said sample includes at least 2 methylation haplotypes indicative of the presence of said target nucleic acid.

20. (canceled)

21. (canceled)

22. (canceled)

23. (canceled)

24. The method of claim 1, comprising enriching the plurality of nucleic acids using selector probes.

25. The method of claim 1, comprising enriching the plurality of nucleic acids using MeDiP.

26. The method of claim 1, wherein the sample comprises genomic DNA.

27. The method of claim 26, wherein said genomic DNA is bisulfite converted.

28. (canceled)

29. The method of claim 1, wherein determining the methylation status of a plurality of methylation sites comprises contacting said plurality of nucleic acids with a plurality of probes to form hybridization complexes.

30. The method of claim 29, comprising modifying said plurality of probes of said hybridization complexes to form a plurality of modified probes.

31. The method of claim 30, wherein modifying said plurality of probes comprises extending and/or ligating said plurality of probes.

32. The method of claim 29, wherein each of said plurality of probes comprises a target-specific domain.

33. The method of claim 30, comprising amplifying said plurality of modified probes.

34. The method of claim 33, wherein each of said plurality of modified probes comprises a unique molecule identifier (UMI).

35. The method of claim 33, wherein each of said plurality of modified probes comprises a primer complementary domain.

36. The method of claim 33, wherein each of said plurality of modified probes comprises two primer complementary domains.

37. The method of claim 29, wherein said plurality of probes are padlock probes.

38. The method of claim 37, wherein said padlock probes comprise two target-specific domains and a linker sequence.

39. (canceled)

40. (canceled)

41. (canceled)

42. (canceled)

43. (canceled)

44. (canceled)

45. (canceled)

46. (canceled)

47. (canceled)

48. (canceled)

49. (canceled)

50. The method of claim 1, wherein said methylation haplotype analysis comprises determining the methylation status of a plurality of methylation sites which are in linkage disequilibrium with one another.

51. A method for detecting a tumor in a subject, comprising:
detecting the presence of one or more target nucleic acids in a sample comprising a plurality of nucleic acids from said subject using the method of claim 1,
wherein the presence of said one or more target nucleic acids is indicative of the presence of a tumor in said subject.

52. The method of claim 51, wherein said sample is a plasma sample isolated from peripheral blood of said subject.

53. The method of claim 51, comprising detecting the presence of at least 2 target nucleic acids in a sample comprising a plurality of nucleic acids.

54. (canceled)

55. (canceled)

56. (canceled)

57. The method of claim 51, wherein each of said one or more target nucleic acids comprises one or more methylation haplotypes that are tumor cell-indicative.

58. (canceled)

59. A method for prenatal detection of fetal chromosomal abnormality, comprising:
detecting the presence of two or more target nucleic acids in a sample comprising a plurality of nucleic acids using the method of claim 1;
calculating the amount of said two or more target nucleic acids; and
determining the presence or absence of fetal chromosomal abnormality by comparing the amount of said two or more target nucleic acids.

60. The method of claim 59, wherein said sample is a plasma sample isolated from peripheral blood of a pregnant woman.

61. (canceled)

62. (canceled)

63. The method of claim 59, comprising detecting the presence of at least 100 target nucleic acids in a sample comprising a plurality of nucleic acids.

64. (canceled)

65. (canceled)

66. The method of claim 59, wherein each of said two or more target nucleic acids comprises one or more methylation haplotypes that are fetal cell-indicative.

67. The method of claim 59, wherein said fetal chromosomal abnormality is trisomy 21 (Down syndrome), trisomy 18 (Edwards syndrome), trisomy 22 (cat eye syndrome), trisomy 13 (Patau syndrome), XO, XXX, XYY, XXY, or a combination thereof.

68. (canceled)

69. (canceled)

70. (canceled)

71. (canceled)

72. (canceled)

73. (canceled)

74. (canceled)

75. (canceled)

76. (canceled)

77. (canceled)

78. (canceled)

79. (canceled)

80. (canceled)

81. (canceled)

The application's sequence listing, which the Patent Office published only in electronic form, follows.

SEQUENCE LISTING (7109 sequences)

SEQ ID NO: 1 - DNA, 146 bp, Artificial Sequence
  Bisulfite Padlock Probe
  misc_feature 96, 97, 98, 99, 100, 101: n = A,T,C or G
gactggaagagcactgttaaaaacaaaaaccccctcacctaatcctcgttggaggctcatcgttcctattcaggcagatgttatcgaggtccgacnnnnnnaaacctctctcgacatcaatcttacgatcggatacgcatgaggct

SEQ ID NO: 2 - DNA, 146 bp, Artificial Sequence
  Bisulfite Padlock Probe
  misc_feature 92, 93, 94, 95, 96, 97: n = A,T,C or G
gactggaagagcactgttaaaaacaaaaataaaacgactacacgttggaggctcatcgttcctattcaggcagatgttatcgaggtccgacnnnnnntacacaaaaaccataaccaaaaccttaaagatcggatacgcatgaggct

SEQ ID NO: 3 - DNA, 146 bp, Artificial Sequence
  Bisulfite Padlock Probe
  misc_feature 92, 93, 94, 95, 96, 97: n = A,T,C or G
gactggaagagcactgttaaaaacaaaaataaaacgactacgcgttggaggctcatcgttcctattcaggcagatgttatcgaggtccgacnnnnnntacacaaaaaccataaccaaaaccttaaagatcggatacgcatgaggct

SEQ ID NO: 4 - DNA, 146 bp, Artificial Sequence
  Bisulfite Padlock Probe
  misc_feature 94, 95, 96, 97, 98, 99: n = A,T,C or G
gactggaagagcactgttaaaaacaaaacaaccccaacaaaaaccgttggaggctcatcgttcctattcaggcagatgttatcgaggtccgacnnnnnntctaccccgaaaacgaaccacaatctagatcggatacgcatgaggct

SEQ ID NO: 5 - DNA, 146 bp, Artificial Sequence
  Bisulfite Padlock Probe
  misc_feature 92, 93, 94, 95, 96, 97: n = A,T,C or G
gactggaagagcactgttaaaaacaaaacccaaaactccaaccgttggaggctcatcgttcctattcaggcagatgttatcgaggtccgacnnnnnnaaaaactcctccaaatacgatcgacacccgatcggatacgcatgaggct

SEQ ID NO: 6 - DNA, 146 bp, Artificial Sequence
  Bisulfite Padlock Probe
  misc_feature 94, 95, 96, 97, 98, 99: n = A,T,C or G
gactggaagagcactgttaaaaacaaaaccgatacacaaacaaacgttggaggctcatcgttcctattcaggcagatgttatcgaggtccgacnnnnnnaatcctcaacactacaaactcctaaccgatcggatacgcatgaggct

SEQ ID NO: 7 - DNA, 146 bp, Artificial Sequence
  Bisulfite Padlock Probe
  misc_feature 94, 95, 96, 97, 98, 99: n = A,T,C or G
gactggaagagcactgttaaaaacaaaaccgatacacaaacgaacgttggaggctcatcgttcctattcaggcagatgttatcgaggtccgacnnnnnnaatcctcaacgctacaaactcctaaccgatcggatacgcatgaggct

SEQ ID NO: 8 - DNA, 146 bp, Artificial Sequence
  Bisulfite Padlock Probe
  misc_feature 92, 93, 94, 95, 96, 97: n = A,T,C or G
gactggaagagcactgttaaaaacaaaacgccatcacaatacagttggaggctcatcgttcctattcaggcagatgttatcgaggtccgacnnnnnntactaatattaaaaactaatttcaccaccgatcggatacgcatgaggct

SEQ ID NO: 9 - DNA, 146 bp, Artificial Sequence
  Bisulfite Padlock Probe
  misc_feature 92, 93, 94, 95, 96, 97: n = A,T,C or G
gactggaagagcactgttaaaaacaaaacgccatcacaatacggttggaggctcatcgttcctattcaggcagatgttatcgaggtccgacnnnnnntactaatattaaaaactaatttcaccaccgatcggatacgcatgaggct

SEQ ID NO: 10 - DNA, 146 bp, Artificial Sequence
  Bisulfite Padlock Probe
  misc_feature 93, 94, 95, 96, 97, 98: n = A,T,C or G
gactggaagagcactgttaaaaacaaaactcacacgccaaaaacgttggaggctcatcgttcctattcaggcagatgttatcgaggtccgacnnnnnnaaccgcacaaacctccttaacaaacatcgatcggatacgcatgaggct

SEQ ID NO: 11 - DNA, 146 bp, Artificial Sequence
  Bisulfite Padlock Probe
  misc_feature 93, 94, 95, 96, 97, 98: n = A,T,C or G
gactggaagagcactgttaaaaacaaaactcacacgccgaaaacgttggaggctcatcgttcctattcaggcagatgttatcgaggtccgacnnnnnnaaccgcgcaaacctccttaacaaacatcgatcggatacgcatgaggct

SEQ ID NO: 12 - DNA, 146 bp, Artificial Sequence
  Bisulfite Padlock Probe
  misc_feature 96, 97, 98, 99, 100, 101: n = A,T,C or G
gactggaagagcactgttaaaaacaaaatccaaaccttctctatcccgttggaggctcatcgttcctattcaggcagatgttatcgaggtccgacnnnnnnaaaaacccgaacaaataaacctaacgatcggatacgcatgaggct

SEQ ID NO: 13 - DNA, 146 bp, Artificial Sequence
  Bisulfite Padlock Probe
  misc_feature 96, 97, 98, 99, 100, 101: n = A,T,C or G
gactggaagagcactgttaaaaacaaaatccaaaccttctctatcccgttggaggctcatcgttcctattcaggcagatgttatcgaggtccgacnnnnnnaaaaacccgaacgaataaacctaacgatcggatacgcatgaggct

SEQ ID NO: 14 - DNA, 146 bp, Artificial Sequence
  Bisulfite Padlock Probe
  misc_feature 92, 93, 94, 95, 96, 97: n = A,T,C or G
gactggaagagcactgttaaaaacaaaatctcctacatttcccgttggaggctcatcgttcctattcaggcagatgttatcgaggtccgacnnnnnnaaaactatttttcctccttattcctataagatcggatacgcatgaggct

SEQ ID NO: 15 - DNA, 146 bp, Artificial Sequence
  Bisulfite Padlock Probe
  misc_feature 96, 97, 98, 99, 100, 101: n = A,T,C or G
gactggaagagcactgttaaaaacaaaccaaaccctaacccttcttcgttggaggctcatcgttcctattcaggcagatgttatcgaggtccgacnnnnnnaaatacacaacaccaactcaacttcgatcggatacgcatgaggct

SEQ ID NO: 16 - DNA, 146 bp, Artificial Sequence
  Bisulfite Padlock Probe
  misc_feature 96, 97, 98, 99, 100, 101: n = A,T,C or G
gactggaagagcactgttaaaaacaaaccgaaccctaacccttcttcgttggaggctcatcgttcctattcaggcagatgttatcgaggtccgacnnnnnnaaatacacaacaccgactcaacttcgatcggatacgcatgaggct

SEQ ID NO: 17 - DNA, 146 bp, Artificial Sequence
  Bisulfite Padlock Probe
  misc_feature 95, 96, 97, 98, 99, 100: n = A,T,C or G
gactggaagagcactgttaaaaacaaacctaaaactacaaaaaaccgttggaggctcatcgttcctattcaggcagatgttatcgaggtccgacnnnnnnaaaaacaacgatccgcactaaatctcgatcggatacgcatgaggct

SEQ ID NO: 18 - DNA, 146 bp, Artificial Sequence
  Bisulfite Padlock Probe
  misc_feature 95, 96, 97, 98, 99, 100: n = A,T,C or G
gactggaagagcactgttaaaaacaaacctaaaactacgaaaaaccgttggaggctcatcgttcctattcaggcagatgttatcgaggtccgacnnnnnnaaaaacaacgatccgcgctaaatctcgatcggatacgcatgaggct

SEQ ID NO: 19 - DNA, 146 bp, Artificial Sequence
  Bisulfite Padlock Probe
  misc_feature 95, 96, 97, 98, 99, 100: n = A,T,C or G
gactggaagagcactgttaaaaacaaatttacccaattaccataaagttggaggctcatcgttcctattcaggcagatgttatcgaggtccgacnnnnnnaattataccaaaaataaatataaaatgatcggatacgcatgaggct

SEQ ID NO: 20 - DNA, 146 bp, Artificial Sequence
  Bisulfite Padlock Probe
  misc_feature 95, 96, 97, 98, 99, 100: n = A,T,C or G
gactggaagagcactgttaaaaacaaatttacccaattaccataaagttggaggctcatcgttcctattcaggcagatgttatcgaggtccgacnnnnnnaattataccgaaaataaatataaaatgatcggatacgcatgaggct

SEQ ID NO: 21 - DNA, 146 bp, Artificial Sequence
  Bisulfite Padlock Probe
  misc_feature 96, 97, 98, 99, 100, 101: n = A,T,C or G
gactggaagagcactgttaaaaacaacaacaatacccctaaaaccttgttggaggctcatcgttcctattcaggcagatgttatcgaggtccgacnnnnnngacgacgactacacctcctcaaaccgatcggatacgcatgaggct

SEQ ID NO: 22 - DNA, 146 bp, Artificial Sequence
  Bisulfite Padlock Probe
  misc_feature 96, 97, 98, 99, 100, 101: n = A,T,C or G
gactggaagagcactgttaaaaacaacaacaatacccctaaaaccttgttggaggctcatcgttcctattcaggcagatgttatcgaggtccgacnnnnnngacgacgactacgcctcctcaaaccgatcggatacgcatgaggct

SEQ ID NO: 23 - DNA, 146 bp, Artificial Sequence
  Bisulfite Padlock Probe
  misc_feature 92, 93, 94, 95, 96, 97: n = A,T,C or G
gactggaagagcactgttaaaaacaaccaaaaatctctaaaaagttggaggctcatcgttcctattcaggcagatgttatcgaggtccgacnnnnnnactttcactaaaccgcatccctacaaaaagatcggatacgcatgaggct

SEQ ID NO: 24 - DNA, 146 bp, Artificial Sequence
  Bisulfite Padlock Probe
  misc_feature 96, 97, 98, 99, 100, 101: n = A,T,C or G
gactggaagagcactgttaaaaacaaccatcccaacaaccaaaaccagttggaggctcatcgttcctattcaggcagatgttatcgaggtccgacnnnnnnttccccgcaataaataacccccaccgatcggatacgcatgaggct

SEQ ID NO: 25 - DNA, 146 bp, Artificial Sequence
  Bisulfite Padlock Probe
  misc_feature 96, 97, 98, 99, 100, 101: n = A,T,C or G
gactggaagagcactgttaaaaacaaccatcccgacaaccaaaaccagttggaggctcatcgttcctattcaggcagatgttatcgaggtccgacnnnnnnttccccgcgataaataacccccaccgatcggatacgcatgaggct

SEQ ID NO: 26 - DNA, 146 bp, Artificial Sequence
  Bisulfite Padlock Probe
  misc_feature 92, 93, 94, 95, 96, 97: n = A,T,C or G
gactggaagagcactgttaaaaacaaccccatccaccacaaaagttggaggctcatcgttcctattcaggcagatgttatcgaggtccgacnnnnnnaactaaattaaaaacaaaaccaaaaactcgatcggatacgcatgaggct

SEQ ID NO: 27 - DNA, 146 bp, Artificial Sequence
  Bisulfite Padlock Probe
  misc_feature 92, 93, 94, 95, 96, 97: n = A,T,C or G
gactggaagagcactgttaaaaacaaccgaaaatctctaaaaagttggaggctcatcgttcctattcaggcagatgttatcgaggtccgacnnnnnnactttcactaaaccgcgtccctacaaaaagatcggatacgcatgaggct

SEQ ID NO: 28 - DNA, 146 bp, Artificial Sequence
  Bisulfite Padlock Probe
  misc_feature 93, 94, 95, 96, 97, 98: n = A,T,C or G
gactggaagagcactgttaaaaacaacgaaattatcatataaccgttggaggctcatcgttcctattcaggcagatgttatcgaggtccgacnnnnnnaaaaacccaaaaacattttaaccaatacgatcggatacgcatgaggct

SEQ ID NO: 29 - DNA, 146 bp, Artificial Sequence
  Bisulfite Padlock Probe
  misc_feature 93, 94, 95, 96, 97, 98: n = A,T,C or G
gactggaagagcactgttaaaaacaacgaaattatcgtataaccgttggaggctcatcgttcctattcaggcagatgttatcgaggtccgacnnnnnnaaaaacccgaaaacattttaaccaatacgatcggatacgcatgaggct

SEQ ID NO: 30 - DNA, 146 bp, Artificial Sequence
  Bisulfite Padlock Probe
  misc_feature 94, 95, 96, 97, 98, 99: n = A,T,C or G
gactggaagagcactgttaaaaacaacgcgccttttcaaaactacgttggaggctcatcgttcctattcaggcagatgttatcgaggtccgacnnnnnnaaacgcgacgaccacttattacaaatcgatcggatacgcatgaggct

SEQ ID NO: 31 - DNA, 146 bp, Artificial Sequence
  Bisulfite Padlock Probe
  misc_feature 94, 95, 96, 97, 98, 99: n = A,T,C or G
gactggaagagcactgttaaaaacaacgcgccttttcgaaactacgttggaggctcatcgttcctattcaggcagatgttatcgaggtccgacnnnnnnaaacgcgacgaccacttattacgaatcgatcggatacgcatgaggct

SEQ ID NO: 32 - DNA, 146 bp, Artificial Sequence
  Bisulfite Padlock Probe
  misc_feature 92, 93, 94, 95, 96, 97: n = A,T,C or G
gactggaagagcactgttaaaaacaacgctcctaaaaaccaaagttggaggctcatcgttcctattcaggcagatgttatcgaggtccgacnnnnnnaaaaacaaccccaaacctctaaccctctcgatcggatacgcatgaggct

SEQ ID NO: 33 - DNA, 146 bp, Artificial Sequence
  Bisulfite Padlock Probe
  misc_feature 92, 93, 94, 95, 96, 97: n = A,T,C or G
gactggaagagcactgttaaaaacaacgctcctaaaaaccgaagttggaggctcatcgttcctattcaggcagatgttatcgaggtccgacnnnnnnaaaaacaaccccgaacctctaaccctctcgatcggatacgcatgaggct

SEQ ID NO: 34 - DNA, 146 bp, Artificial Sequence
  Bisulfite Padlock Probe
  misc_feature 93, 94, 95, 96, 97, 98: n = A,T,C or G
gactggaagagcactgttaaaaacaactaacatcgacgcccaacgttggaggctcatcgttcctattcaggcagatgttatcgaggtccgacnnnnnncgaccccgtaccaccctaaaattacttagatcggatacgcatgaggct

SEQ ID NO: 35 - DNA, 146 bp, Artificial Sequence
  Bisulfite Padlock Probe
  misc_feature 93, 94, 95, 96, 97, 98: n = A,T,C or G
gactggaagagcactgttaaaaacaactaacatcgacgcccgacgttggaggctcatcgttcctattcaggcagatgttatcgaggtccgacnnnnnncgaccccgtaccgccctaaaattacttagatcggatacgcatgaggct

SEQ ID NO: 36 - DNA, 146 bp, Artificial Sequence
  Bisulfite Padlock Probe
  misc_feature 95, 96, 97, 98, 99, 100: n = A,T,C or G
gactggaagagcactgttaaaaacaactaattcacaaaaatcaaaagttggaggctcatcgttcctattcaggcagatgttatcgaggtccgacnnnnnnccgacgacaacatctaccaaaataaagatcggatacgcatgaggct

SEQ ID NO: 37 - DNA, 146 bp, Artificial Sequence
  Bisulfite Padlock Probe
  misc_feature 95, 96, 97, 98, 99, 100: n = A,T,C or G
gactggaagagcactgttaaaaacaactaattcacaaaaatcaaaagttggaggctcatcgttcctattcaggcagatgttatcgaggtccgacnnnnnnccgacgacaacgtctaccaaaataaagatcggatacgcatgaggct

SEQ ID NO: 38 - DNA, 146 bp, Artificial Sequence
  Bisulfite Padlock Probe
  misc_feature 94, 95, 96, 97, 98, 99: n = A,T,C or G
gactggaagagcactgttaaaaacaactcccttataaaaactaccgttggaggctcatcgttcctattcaggcagatgttatcgaggtccgacnnnnnnccccgaaatcactccctaaacaaaaccgatcggatacgcatgaggct

SEQ ID NO: 39 - DNA, 146 bp, Artificial Sequence
  Bisulfite Padlock Probe
  misc_feature 94, 95, 96, 97, 98, 99: n = A,T,C or G
gactggaagagcactgttaaaaacaactcccttataaaaactaccgttggaggctcatcgttcctattcaggcagatgttatcgaggtccgacnnnnnnccccgaaatcgctccctaaacaaaaccgatcggatacgcatgaggct

SEQ ID NO: 40 - DNA, 146 bp, Artificial Sequence
  Bisulfite Padlock Probe
  misc_feature 93, 94, 95, 96, 97, 98: n = A,T,C or G
gactggaagagcactgttaaaaacaataaacaaactattaaaaagttggaggctcatcgttcctattcaggcagatgttatcgaggtccgacnnnnnnataatatactacacccaaaaataaaatcgatcggatacgcatgaggct

SEQ ID NO: 41 - DNA, 146 bp, Artificial Sequence
  Bisulfite Padlock Probe
  misc_feature 92, 93, 94, 95, 96, 97: n = A,T,C or G
gactggaagagcactgttaaaaacaataataaaaccctaacccgttggaggctcatcgttcctattcaggcagatgttatcgaggtccgacnnnnnnaaaaaccccgaactacaaatctccaaaccgatcggatacgcatgaggct

SEQ ID NO: 42 - DNA, 146 bp, Artificial Sequence
  Bisulfite Padlock Probe
  misc_feature 94, 95, 96, 97, 98, 99: n = A,T,C or G
gactggaagagcactgttaaaaacaatttatatctttctaaacaagttggaggctcatcgttcctattcaggcagatgttatcgaggtccgacnnnnnnacccctaccaatacccaaaacaccttcgatcggatacgcatgaggct

SEQ ID NO: 43 - DNA, 146 bp, Artificial Sequence
  Bisulfite Padlock Probe
  misc_feature 95, 96, 97, 98, 99, 100: n = A,T,C or G
gactggaagagcactgttaaaaacacaaaacgaccaacgcaactccgttggaggctcatcgttcctattcaggcagatgttatcgaggtccgacnnnnnnaaacgcacatccaaaccctcaaacacgatcggatacgcatgaggct

SEQ ID NO: 44 - DNA, 146 bp, Artificial Sequence
  Bisulfite Padlock Probe
  misc_feature 95, 96, 97, 98, 99, 100: n = A,T,C or G
gactggaagagcactgttaaaaacacaaaacgaccaacgcgactccgttggaggctcatcgttcctattcaggcagatgttatcgaggtccgacnnnnnnaaacgcacatccgaaccctcaaacacgatcggatacgcatgaggct

SEQ ID NO: 45 - DNA, 146 bp, Artificial Sequence
  Bisulfite Padlock Probe
  misc_feature 94, 95, 96, 97, 98, 99: n = A,T,C or G
gactggaagagcactgttaaaaacacaaacctaacacactacaacgttggaggctcatcgttcctattcaggcagatgttatcgaggtccgacnnnnnnccaaccaaaaacaacaaacccctcaccgatcggatacgcatgaggct

SEQ ID NO: 46 - DNA, 146 bp, Artificial Sequence
  Bisulfite Padlock Probe
  misc_feature 94, 95, 96, 97, 98, 99: n = A,T,C or G
gactggaagagcactgttaaaaacacaaacctaacgcactacaacgttggaggctcatcgttcctattcaggcagatgttatcgaggtccgacnnnnnnccaaccgaaaacaacaaacccctcaccgatcggatacgcatgaggct

SEQ ID NO: 47 - DNA, 146 bp, Artificial Sequence
  Bisulfite Padlock Probe
  misc_feature 93, 94, 95, 96, 97, 98: n = A,T,C or G
gactggaagagcactgttaaaaacacaactcgaaacccataaccgttggaggctcatcgttcctattcaggcagatgttatcgaggtccgacnnnnnncacacacacacacacacacacatacacagatcggatacgcatgaggct

SEQ ID NO: 48 - DNA, 146 bp, Artificial Sequence
  Bisulfite Padlock Probe
  misc_feature 93, 94, 95, 96, 97, 98: n = A,T,C or G
gactggaagagcactgttaaaaacacaactcgaaacccgtaaccgttggaggctcatcgttcctattcaggcagatgttatcgaggtccgacnnnnnncacacacacacacacacacacatacacagatcggatacgcatgaggct

SEQ ID NO: 49 - DNA, 146 bp, Artificial Sequence
  Bisulfite Padlock Probe
  misc_feature 92, 93, 94, 95, 96, 97: n = A,T,C or G
gactggaagagcactgttaaaaacacacacacacgacatcaccgttggaggctcatcgttcctattcaggcagatgttatcgaggtccgacnnnnnnaataaccgcaaaaacaaacactcccctacgatcggatacgcatgaggct

SEQ ID NO: 50 - DNA, 146 bp, Artificial Sequence
  Bisulfite Padlock Probe
  misc_feature 92, 93, 94, 95, 96, 97: n = A,T,C or G
gactggaagagcactgttaaaaacacacacacacgacgtcaccgttggaggctcatcgttcctattcaggcagatgttatcgaggtccgacnnnnnnaataaccgcaaaaacaaacgctcccctacgatcggatacgcatgaggct

SEQ ID NO: 51 - DNA, 146 bp, Artificial Sequence
  Bisulfite Padlock Probe
  misc_feature 92, 93, 94, 95, 96, 97: n = A,T,C or G
gactggaagagcactgttaaaaacacactccataatcaaatacgttggaggctcatcgttcctattcaggcagatgttatcgaggtccgacnnnnnnacaaaaacaacacaactaaaacacctacagatcggatacgcatgaggct

SEQ ID NO: 52 - DNA, 146 bp, Artificial Sequence
  Bisulfite Padlock Probe
  misc_feature 94, 95, 96, 97, 98, 99: n = A,T,C or G
gactggaagagcactgttaaaaacacatccacctcctccaacaacgttggaggctcatcgttcctattcaggcagatgttatcgaggtccgacnnnnnnacctccccgaaccgaaacaactaaaacgatcggatacgcatgaggct

SEQ ID NO: 53 - DNA, 146 bp, Artificial Sequence
  Bisulfite Padlock Probe
  misc_feature 94, 95, 96, 97, 98, 99: n = A,T,C or G
gactggaagagcactgttaaaaacacatccacctcctccgacaacgttggaggctcatcgttcctattcaggcagatgttatcgaggtccgacnnnnnnacctccccgaaccgaaacgactaaaacgatcggatacgcatgaggct

SEQ ID NO: 54 - DNA, 146 bp, Artificial Sequence
  Bisulfite Padlock Probe
  misc_feature 92, 93, 94, 95, 96, 97: n = A,T,C or G
gactggaagagcactgttaaaaacacccgaaaacgacaccaccgttggaggctcatcgttcctattcaggcagatgttatcgaggtccgacnnnnnnaaaaacgcctaccgaatcaaaactaaaaagatcggatacgcatgaggct

SEQ ID NO: 55 - DNA, 146 bp, Artificial Sequence
  Bisulfite Padlock Probe
  misc_feature 92, 93, 94, 95, 96, 97: n = A,T,C or G
gactggaagagcactgttaaaaacacccgaaaacgacaccgccgttggaggctcatcgttcctattcaggcagatgttatcgaggtccgacnnnnnnaaaaacgcctaccgaatcgaaactaaaaagatcggatacgcatgaggct

SEQ ID NO: 56 - DNA, 146 bp, Artificial Sequence
  Bisulfite Padlock Probe
  misc_feature 93, 94, 95, 96, 97, 98: n = A,T,C or G
gactggaagagcactgttaaaaacacgaaaacactcgacaccccgttggaggctcatcgttcctattcaggcagatgttatcgaggtccgacnnnnnnacccaatacccgatactccataaaaattgatcggatacgcatgaggct

SEQ ID NO: 57 - DNA, 146 bp, Artificial Sequence
  Bisulfite Padlock Probe
  misc_feature 93, 94, 95, 96, 97, 98: n = A,T,C or G
gactggaagagcactgttaaaaacacgaaaacactcgacgccccgttggaggctcatcgttcctattcaggcagatgttatcgaggtccgacnnnnnnacccaatacccgatactccgtaaaaattgatcggatacgcatgaggct

SEQ ID NO: 58 - DNA, 146 bp, Artificial Sequence
  Bisulfite Padlock Probe
  misc_feature 96, 97, 98, 99, 100, 101: n = A,T,C or G
gactggaagagcactgttaaaaacacgaacgataacgtaccataaacgttggaggctcatcgttcctattcaggcagatgttatcgaggtccgacnnnnnnaaaaacgaaaacttaacaaaactaagatcggatacgcatgaggct

SEQ ID NO: 59 - DNA, 146 bp, Artificial Sequence
  Bisulfite Padlock Probe
  misc_feature 96, 97, 98, 99, 100, 101: n = A,T,C or G
gactggaagagcactgttaaaaacacgaacgataacgtaccgtaaacgttggaggctcatcgttcctattcaggcagatgttatcgaggtccgacnnnnnnaaaaacgaaaacttaacgaaactaagatcggatacgcatgaggct

SEQ ID NO: 60 - DNA, 146 bp, Artificial Sequence
  Bisulfite Padlock Probe
  misc_feature 94, 95, 96, 97, 98, 99: n = A,T,C or G
gactggaagagcactgttaaaaacacgactaccccgcatcataccgttggaggctcatcgttcctattcaggcagatgttatcgaggtccgacnnnnnnaatcgaaactcgatttcccacaaactcgatcggatacgcatgaggct

SEQ ID NO: 61 - DNA, 146 bp, Artificial Sequence
  Bisulfite Padlock Probe
  misc_feature 94, 95, 96, 97, 98, 99: n = A,T,C or G
gactggaagagcactgttaaaaacacgactaccccgcatcgtaccgttggaggctcatcgttcctattcaggcagatgttatcgaggtccgacnnnnnnaatcgaaactcgatttcccacgaactcgatcggatacgcatgaggct

SEQ ID NO: 62 - DNA, 146 bp, Artificial Sequence
  Bisulfite Padlock Probe
  misc_feature 92, 93, 94, 95, 96, 97: n = A,T,C or G
gactggaagagcactgttaaaaacacgcaccgtaaacaacaacgttggaggctcatcgttcctattcaggcagatgttatcgaggtccgacnnnnnnctcaaacgaaacccccaaacaacttaaatgatcggatacgcatgaggct

SEQ ID NO: 63 - DNA, 146 bp, Artificial Sequence
  Bisulfite Padlock Probe
  misc_feature 92, 93, 94, 95, 96, 97: n = A,T,C or G
gactggaagagcactgttaaaaacacgcaccgtaaacgacaacgttggaggctcatcgttcctattcaggcagatgttatcgaggtccgacnnnnnnctcaaacgaaacccccgaacaacttaaatgatcggatacgcatgaggct

SEQ ID NO: 64 - DNA, 146 bp, Artificial Sequence
  Bisulfite Padlock Probe
  misc_feature 92, 93, 94, 95, 96, 97: n = A,T,C or G
gactggaagagcactgttaaaaacactatctaccaaccatctagttggaggctcatcgttcctattcaggcagatgttatcgaggtccgacnnnnnnaataaccactaacacctaaaaactaaaaagatcggatacgcatgaggct

SEQ ID NO: 65 - DNA, 146 bp, Artificial Sequence
  Bisulfite Padlock Probe
  misc_feature 92, 93, 94, 95, 96, 97: n = A,T,C or G
gactggaagagcactgttaaaaacactctcccacttccgacacgttggaggctcatcgttcctattcaggcagatgttatcgaggtccgacnnnnnnttatatttaatatatatcttatactccccgatcggatacgcatgaggct

SEQ ID NO: 66 - DNA, 146 bp, Artificial Sequence
  Bisulfite Padlock Probe
  misc_feature 92, 93, 94, 95, 96, 97: n = A,T,C or G
gactggaagagcactgttaaaaacactctcccacttccgacgcgttggaggctcatcgttcctattcaggcagatgttatcgaggtccgacnnnnnnttatatttaatatatatcttatactccccgatcggatacgcatgaggct

SEQ ID NO: 67 - DNA, 146 bp, Artificial Sequence
  Bisulfite Padlock Probe
  misc_feature 92, 93, 94, 95, 96, 97: n = A,T,C or G
gactggaagagcactgttaaaaacataaaaacaattccccaccgttggaggctcatcgttcctattcaggcagatgttatcgaggtccgacnnnnnnaaaccattcgcaacccacaaacttaaaaagatcggatacgcatgaggct

SEQ ID NO: 68 - DNA, 146 bp, Artificial Sequence
  Bisulfite Padlock Probe
  misc_feature 95, 96, 97, 98, 99, 100: n = A,T,C or G
gactggaagagcactgttaaaaacataatttcatccgaacactatcgttggaggctcatcgttcctattcaggcagatgttatcgaggtccgacnnnnnncctaaactacccgaaacgtaacaaccgatcggatacgcatgaggct

SEQ ID NO: 69 - DNA, 146 bp, Artificial Sequence
  Bisulfite Padlock Probe
  misc_feature 95, 96, 97, 98, 99, 100: n = A,T,C or G
gactggaagagcactgttaaaaacataatttcatccgaacgctatcgttggaggctcatcgttcctattcaggcagatgttatcgaggtccgacnnnnnncctaaactacccgaaacgtaacgaccgatcggatacgcatgaggct

SEQ ID NO: 70 - DNA, 146 bp, Artificial Sequence
  Bisulfite Padlock Probe
  misc_feature 93, 94, 95, 96, 97, 98: n = A,T,C or G
gactggaagagcactgttaaaaacatctaacaaaccctacctccgttggaggctcatcgttcctattcaggcagatgttatcgaggtccgacnnnnnncttaatttttaaaacaattaactccaaagatcggatacgcatgaggct

SEQ ID NO: 71 - DNA, 146 bp, Artificial Sequence
  Bisulfite Padlock Probe
  misc_feature 92, 93, 94, 95, 96, 97: n = A,T,C or G
gactggaagagcactgttaaaaacattaaactattataaactcgttggaggctcatcgttcctattcaggcagatgttatcgaggtccgacnnnnnncccaattcataaccgaaaaccaacacaacgatcggatacgcatgaggct

SEQ ID NO: 72 - DNA, 146 bp, Artificial Sequence
  Bisulfite Padlock Probe
  misc_feature 93, 94, 95, 96, 97, 98: n = A,T,C or G
gactggaagagcactgttaaaaacattctctctcctatctccccgttggaggctcatcgttcctattcaggcagatgttatcgaggtccgacnnnnnncccactccaaaacttactccacaaactcgatcggatacgcatgaggct

SEQ ID NO: 73 - DNA, 146 bp, Artificial Sequence
  Bisulfite Padlock Probe
  misc_feature 93, 94, 95, 96, 97, 98: n = A,T,C or G
gactggaagagcactgttaaaaacattctctctcctatctccccgttggaggctcatcgttcctattcaggcagatgttatcgaggtccgacnnnnnncccactccgaaacttactccacaaactcgatcggatacgcatgaggct

SEQ ID NO: 74 - DNA, 146 bp, Artificial Sequence
  Bisulfite Padlock Probe
  misc_feature 92, 93, 94, 95, 96, 97: n = A,T,C or G
gactggaagagcactgttaaaaaccaaaaaacaaaaataaaaagttggaggctcatcgttcctattcaggcagatgttatcgaggtccgacnnnnnncaataaacgaccgcgacgaacaaaacaaagatcggatacgcatgaggct

SEQ ID NO: 75 - DNA, 146 bp, Artificial Sequence
  Bisulfite Padlock Probe
  misc_feature 96, 97, 98, 99, 100, 101: n = A,T,C or G
gactggaagagcactgttaaaaaccaaaaacgctcattttccaaaaagttggaggctcatcgttcctattcaggcagatgttatcgaggtccgacnnnnnncgcgctcaaaactacaaataaaaccgatcggatacgcatgaggct

SEQ ID NO: 76 - DNA, 146 bp, Artificial Sequence
  Bisulfite Padlock Probe
  misc_feature 96, 97, 98, 99, 100, 101: n = A,T,C or G
gactggaagagcactgttaaaaaccaaaaacgctcgttttccaaaaagttggaggctcatcgttcctattcaggcagatgttatcgaggtccgacnnnnnncgcgctcgaaactacaaataaaaccgatcggatacgcatgaggct

SEQ ID NO: 77 - DNA, 146 bp, Artificial Sequence
  Bisulfite Padlock Probe
  misc_feature 93, 94, 95, 96, 97, 98: n = A,T,C or G
gactggaagagcactgttaaaaaccaaaacaacaaaaataaaaagttggaggctcatcgttcctattcaggcagatgttatcgaggtccgacnnnnnngcaaactaaaactcgaaaacacataaccgatcggatacgcatgaggct

SEQ ID NO: 78 - DNA, 146 bp, Artificial Sequence
  Bisulfite Padlock Probe
  misc_feature 94, 95, 96, 97, 98, 99: n = A,T,C or G
gactggaagagcactgttaaaaaccaaaaccactaaataaaacccgttggaggctcatcgttcctattcaggcagatgttatcgaggtccgacnnnnnnatccctactaccacctcccctactatcgatcggatacgcatgaggct

SEQ ID NO: 79 - DNA, 146 bp, Artificial Sequence
  Bisulfite Padlock Probe
  misc_feature 96, 97, 98, 99, 100, 101: n = A,T,C or G
gactggaagagcactgttaaaaaccaaaccacgaaataaaccccattgttggaggctcatcgttcctattcaggcagatgttatcgaggtccgacnnnnnnaaaaacgaacaccgcaaccatcctcgatcggatacgcatgaggct

SEQ ID NO: 80 - DNA, 146 bp, Artificial Sequence
  Bisulfite Padlock Probe
  misc_feature 96, 97, 98, 99, 100, 101: n = A,T,C or G
gactggaagagcactgttaaaaaccaaaccacgaaataaaccccgttgttggaggctcatcgttcctattcaggcagatgttatcgaggtccgacnnnnnnaaaaacgaacaccgcaaccgtcctcgatcggatacgcatgaggct

SEQ ID NO: 81 - DNA, 146 bp, Artificial Sequence
  Bisulfite Padlock Probe
  misc_feature 93, 94, 95, 96, 97, 98: n = A,T,C or G
gactggaagagcactgttaaaaaccaaacccgaccaaaaataacgttggaggctcatcgttcctattcaggcagatgttatcgaggtccgacnnnnnnaaattaactaccgaaaaatcgacactaagatcggatacgcatgaggct

SEQ ID NO: 82 - DNA, 146 bp, Artificial Sequence
  Bisulfite Padlock Probe
  misc_feature 93, 94, 95, 96, 97, 98: n = A,T,C or G
gactggaagagcactgttaaaaaccaaacccgaccgaaaataacgttggaggctcatcgttcctattcaggcagatgttatcgaggtccgacnnnnnnaaattaactaccgaaaaatcgacgctaagatcggatacgcatgaggct

SEQ ID NO: 83 - DNA, 146 bp, Artificial Sequence
  Bisulfite Padlock Probe
  misc_feature 93, 94, 95, 96, 97, 98: n = A,T,C or G
gactggaagagcactgttaaaaaccaacaaaaacgaaaaatcacgttggaggctcatcgttcctattcaggcagatgttatcgaggtccgacnnnnnnaaccgaccctaaaactactacccaaaccgatcggatacgcatgaggct

SEQ ID NO: 84 - DNA, 146 bp, Artificial Sequence
  Bisulfite Padlock Probe
  misc_feature 93, 94, 95, 96, 97, 98: n = A,T,C or G
gactggaagagcactgttaaaaaccaacaaaaacgaaaaatcgcgttggaggctcatcgttcctattcaggcagatgttatcgaggtccgacnnnnnnaaccgaccctaaaactactacccgaaccgatcggatacgcatgaggct

SEQ ID NO: 85 - DNA, 146 bp, Artificial Sequence
  Bisulfite Padlock Probe
  misc_feature 92, 93, 94, 95, 96, 97: n = A,T,C or G
gactggaagagcactgttaaaaaccaaccccgacacacaacaagttggaggctcatcgttcctattcaggcagatgttatcgaggtccgacnnnnnncaacatctaaaaccgaaaacgccaacctcgatcggatacgcatgaggct

SEQ ID NO: 86 - DNA, 146 bp, Artificial Sequence
  Bisulfite Padlock Probe
  misc_feature 92, 93, 94, 95, 96, 97: n = A,T,C or G
gactggaagagcactgttaaaaaccaaccccgacacacaacgagttggaggctcatcgttcctattcaggcagatgttatcgaggtccgacnnnnnncaacatctaaaaccgaaaacgccgacctcgatcggatacgcatgaggct

SEQ ID NO: 87 - DNA, 146 bp, Artificial Sequence
  Bisulfite Padlock Probe
  misc_feature 92, 93, 94, 95, 96, 97: n = A,T,C or G
gactggaagagcactgttaaaaaccaacttaaccacctctcccgttggaggctcatcgttcctattcaggcagatgttatcgaggtccgacnnnnnnaaaaacaaaactatacataaatctaacccgatcggatacgcatgaggct

SEQ ID NO: 88 - DNA, 146 bp, Artificial Sequence
  Bisulfite Padlock Probe
  misc_feature 92, 93, 94, 95, 96, 97: n = A,T,C or G
gactggaagagcactgttaaaaaccaacttaaccgcctctcccgttggaggctcatcgttcctattcaggcagatgttatcgaggtccgacnnnnnnaaaaacaaaactatacgtaaatctaacccgatcggatacgcatgaggct

SEQ ID NO: 89 - DNA, 146 bp, Artificial Sequence
  Bisulfite Padlock Probe
  misc_feature 95, 96, 97, 98, 99, 100: n = A,T,C or G
gactggaagagcactgttaaaaaccaataacaaaaccgccccaaccgttggaggctcatcgttcctattcaggcagatgttatcgaggtccgacnnnnnnattctcctcgtcctcactcaacaaccgatcggatacgcatgaggct

SEQ ID NO: 90 - DNA, 146 bp, Artificial Sequence
  Bisulfite Padlock Probe
  misc_feature 95, 96, 97, 98, 99, 100: n = A,T,C or G
gactggaagagcactgttaaaaaccaataacaaaaccgccccgaccgttggaggctcatcgttcctattcaggcagatgttatcgaggtccgacnnnnnnattctcctcgtcctcgctcaacaaccgatcggatacgcatgaggct

SEQ ID NO: 91 - DNA, 146 bp, Artificial Sequence
  Bisulfite Padlock Probe
  misc_feature 93, 94, 95, 96, 97, 98: n = A,T,C or G
gactggaagagcactgttaaaaaccacaacctaaaacctaaaacgttggaggctcatcgttcctattcaggcagatgttatcgaggtccgacnnnnnnttaaaatcctcaactaccatctaaaaccgatcggatacgcatgaggct

SEQ ID NO: 92 - DNA, 146 bp, Artificial Sequence
  Bisulfite Padlock Probe
  misc_feature 93, 94, 95, 96, 97, 98: n = A,T,C or G
gactggaagagcactgttaaaaaccacaacctaaaacctaaaacgttggaggctcatcgttcctattcaggcagatgttatcgaggtccgacnnnnnnttaaaatcctcgactaccatctaaaaccgatcggatacgcatgaggct

SEQ ID NO: 93 - DNA, 146 bp, Artificial Sequence
  Bisulfite Padlock Probe
  misc_feature 95, 96, 97, 98, 99, 100: n = A,T,C or G
gactggaagagcactgttaaaaaccataaacgataaacgataccaagttggaggctcatcgttcctattcaggcagatgttatcgaggtccgacnnnnnnactcctaacgacttaacccaaaacccgatcggatacgcatgaggct

SEQ ID NO: 94 - DNA, 146 bp, Artificial Sequence
  Bisulfite Padlock Probe
  misc_feature 95, 96, 97, 98, 99, 100: n = A,T,C or G
gactggaagagcactgttaaaaaccataaacgataaacgataccgagttggaggctcatcgttcctattcaggcagatgttatcgaggtccgacnnnnnnactcctaacgacttaacccgaaacccgatcggatacgcatgaggct

SEQ ID NO: 95 - DNA, 146 bp, Artificial Sequence
  Bisulfite Padlock Probe
  misc_feature 93, 94, 95, 96, 97, 98: n = A,T,C or G
gactggaagagcactgttaaaaaccatactatacgcactaaaccgttggaggctcatcgttcctattcaggcagatgttatcgaggtccgacnnnnnntaacgtaactaacgcaaacaaacctaacgatcggatacgcatgaggct

SEQ ID NO: 96 - DNA, 146 bp, Artificial Sequence
  Bisulfite Padlock Probe
  misc_feature 93, 94, 95, 96, 97, 98: n = A,T,C or G
gactggaagagcactgttaaaaaccatactatacgcgctaaaccgttggaggctcatcgttcctattcaggcagatgttatcgaggtccgacnnnnnntaacgtaactaacgcaaacgaacctaacgatcggatacgcatgaggct

SEQ ID NO: 97 - DNA, 146 bp, Artificial Sequence
  Bisulfite Padlock Probe
  misc_feature 94, 95, 96, 97, 98, 99: n = A,T,C or G
gactggaagagcactgttaaaaaccatcccaaaaatccccaacccgttggaggctcatcgttcctattcaggcagatgttatcgaggtccgacnnnnnntctctaacctctacttcttccttctccgatcggatacgcatgaggct

SEQ ID NO: 98 - DNA, 146 bp, Artificial Sequence
  Bisulfite Padlock Probe
  misc_feature 94, 95, 96, 97, 98, 99: n = A,T,C or G
gactggaagagcactgttaaaaaccatcccgaaaatccccaacccgttggaggctcatcgttcctattcaggcagatgttatcgaggtccgacnnnnnntctctaacctctacttcttccttctccgatcggatacgcatgaggct

SEQ ID NO: 99 - DNA, 146 bp, Artificial Sequence
  Bisulfite Padlock Probe
  misc_feature 95, 96, 97, 98, 99, 100: n = A,T,C or G
gactggaagagcactgttaaaaaccatttcccttacaatctaaaaagttggaggctcatcgttcctattcaggcagatgttatcgaggtccgacnnnnnnccccttctccaatccgcactaaacaagatcggatacgcatgaggct

SEQ ID NO: 100 - DNA, 146 bp, Artificial Sequence
  Bisulfite Padlock Probe
  misc_feature 94, 95, 96, 97, 98, 99: n = A,T,C or G
gactggaagagcactgttaaaaacccaaaacaacgcccctcaacagttggaggctcatcgttcctattcaggcagatgttatcgaggtccgacnnnnnncacgcccgtctactctacgacaaaaaagatcggatacgcatgaggct

SEQ ID NO: 101 - DNA, 146 bp, Artificial Sequence
  Bisulfite Padlock Probe
  misc_feature 94, 95, 96, 97, 98, 99: n = A,T,C or G
gactggaagagcactgttaaaaacccaaaacaacgcccctcaacggttggaggctcatcgttcctattcaggcagatgttatcgaggtccgacnnnnnncacgcccgtctactctacgacgaaaaagatcggatacgcatgaggct

SEQ ID NO: 102 - DNA, 146 bp, Artificial Sequence
  Bisulfite Padlock Probe
  misc_feature 92, 93, 94, 95, 96, 97: n = A,T,C or G
gactggaagagcactgttaaaaacccaaaaccaaccaaaaaccgttggaggctcatcgttcctattcaggcagatgttatcgaggtccgacnnnnnnccaaatcaatataaaacgccatccctaccgatcggatacgcatgaggct

SEQ ID NO: 103 - DNA, 146 bp, Artificial Sequence
  Bisulfite Padlock Probe
  misc_feature 92, 93, 94, 95, 96, 97: n = A,T,C or G
gactggaagagcactgttaaaaacccaaaaccaaccgaaaaccgttggaggctcatcgttcctattcaggcagatgttatcgaggtccgacnnnnnnccaaatcaatataaaacgccgtccctaccgatcggatacgcatgaggct

SEQ ID NO: 104 - DNA, 146 bp, Artificial Sequence
  Bisulfite Padlock Probe
  misc_feature 93, 94, 95, 96, 97, 98: n = A,T,C or G
gactggaagagcactgttaaaaacccaaaccaacatccccaatcgttggaggctcatcgttcctattcaggcagatgttatcgaggtccgacnnnnnnccgccgaatactcgtccgaaaaataacagatcggatacgcatgaggct

SEQ ID NO: 105 - DNA, 146 bp, Artificial Sequence
  Bisulfite Padlock Probe
  misc_feature 93, 94, 95, 96, 97, 98: n = A,T,C or G
gactggaagagcactgttaaaaacccaacaactaaaaactaaacgttggaggctcatcgttcctattcaggcagatgttatcgaggtccgacnnnnnntatccctaacaaaacccaatactaaaccgatcggatacgcatgaggct

SEQ ID NO: 106 - DNA, 146 bp, Artificial Sequence
  Bisulfite Padlock Probe
  misc_feature 92, 93, 94, 95, 96, 97: n = A,T,C or G
gactggaagagcactgttaaaaacccaataaccttcaacaccagttggaggctcatcgttcctattcaggcagatgttatcgaggtccgacnnnnnnaaacacaactacctctcctaacaaaactagatcggatacgcatgaggct

SEQ ID NO: 107 - DNA, 146 bp, Artificial Sequence
  Bisulfite Padlock Probe
  misc_feature 92, 93, 94, 95, 96, 97: n = A,T,C or G
gactggaagagcactgttaaaaacccaataaccttcaacaccggttggaggctcatcgttcctattcaggcagatgttatcgaggtccgacnnnnnnaaacacaactacctctcctaacaaaactagatcggatacgcatgaggct

SEQ ID NO: 108 - DNA, 146 bp, Artificial Sequence
  Bisulfite Padlock Probe
  misc_feature 92, 93, 94, 95, 96, 97: n = A,T,C or G
gactggaagagcactgttaaaaacccacacccccgcaaaatacgttggaggctcatcgttcctattcaggcagatgttatcgaggtccgacnnnnnntaaaaacgaaacccgaaaccaaataaatagatcggatacgcatgaggct

SEQ ID NO: 109 - DNA, 146 bp, Artificial Sequence
  Bisulfite Padlock Probe
  misc_feature 92, 93, 94, 95, 96, 97: n = A,T,C or G
gactggaagagcactgttaaaaacccacacccccgcgaaatacgttggaggctcatcgttcctattcaggcagatgttatcgaggtccgacnnnnnntaaaaacgaaacccgaaaccgaataaatagatcggatacgcatgaggct

SEQ ID NO: 110 - DNA, 146 bp, Artificial Sequence
  Bisulfite Padlock Probe
  misc_feature 92, 93, 94, 95, 96, 97: n = A,T,C or G
gactggaagagcactgttaaaaacccataaacccataactaaagttggaggctcatcgttcctattcaggcagatgttatcgaggtccgacnnnnnncccctccccaaacaaccaataccaaataagatcggatacgcatgaggct

SEQ ID NO: 111 - DNA, 146 bp, Artificial Sequence
  Bisulfite Padlock Probe
  misc_feature 92, 93, 94, 95, 96, 97: n = A,T,C or G
gactggaagagcactgttaaaaaccccaaccccaacttcattagttggaggctcatcgttcctattcaggcagatgttatcgaggtccgacnnnnnnataaaaacaacctaataaatcccctaaccgatcggatacgcatgaggct

SEQ ID NO: 112 - DNA, 146 bp, Artificial Sequence
  Bisulfite Padlock Probe
  misc_feature 92, 93, 94, 95, 96, 97: n = A,T,C or G
gactggaagagcactgttaaaaaccccaaccccaacttcattagttggaggctcatcgttcctattcaggcagatgttatcgaggtccgacnnnnnnataaaaacgacctaataaatcccctaaccgatcggatacgcatgaggct

SEQ ID NO: 113 - DNA, 146 bp, Artificial Sequence
  Bisulfite Padlock Probe
  misc_feature 94, 95, 96, 97, 98, 99: n = A,T,C or G
gactggaagagcactgttaaaaaccccaataccacaacccaaaacgttggaggctcatcgttcctattcaggcagatgttatcgaggtccgacnnnnnnctccaaaatcaaataacgaaaccgcaagatcggatacgcatgaggct

SEQ ID NO: 114 - DNA, 146 bp, Artificial Sequence
  Bisulfite Padlock Probe
  misc_feature 94, 95, 96, 97, 98, 99: n = A,T,C or G
gactggaagagcactgttaaaaaccccaataccacaacccaaaacgttggaggctcatcgttcctattcaggcagatgttatcgaggtccgacnnnnnnctccaaaatcaaataacgaaaccgcgagatcggatacgcatgaggct

SEQ ID NO: 115 - DNA, 146 bp, Artificial Sequence
  Bisulfite Padlock Probe
  misc_feature 95, 96, 97, 98, 99, 100: n = A,T,C or G
gactggaagagcactgttaaaaacccccgaaaacgaacaataaaaagttggaggctcatcgttcctattcaggcagatgttatcgaggtccgacnnnnnncttctccgaattttaacaaaaacctagatcggatacgcatgaggct

SEQ ID NO: 116 - DNA, 146 bp, Artificial Sequence
  Bisulfite Padlock Probe
  misc_feature 95, 96, 97, 98, 99, 100: n = A,T,C or G
gactggaagagcactgttaaaaacccccgaaaacgaacgataaaaagttggaggctcatcgttcctattcaggcagatgttatcgaggtccgacnnnnnncttctccgaattttaacgaaaacctagatcggatacgcatgaggct

SEQ ID NO: 117 - DNA, 146 bp, Artificial Sequence
  Bisulfite Padlock Probe
  misc_feature 96, 97, 98, 99, 100, 101: n = A,T,C or G
gactggaagagcactgttaaaaacccccgcacaattttaaaattaccgttggaggctcatcgttcctattcaggcagatgttatcgaggtccgacnnnnnnccccaccaaaacacaatcaacatacgatcggatacgcatgaggct

SEQ ID NO: 118 - DNA, 146 bp, Artificial Sequence
  Bisulfite Padlock Probe
  misc_feature 96, 97, 98, 99, 100, 101: n = A,T,C or G
gactggaagagcactgttaaaaacccccgcgcaattttaaaattaccgttggaggctcatcgttcctattcaggcagatgttatcgaggtccgacnnnnnnccccaccaaaacacaatcaacgtacgatcggatacgcatgaggct

SEQ ID NO: 119 - DNA, 146 bp, Artificial Sequence
  Bisulfite Padlock Probe
  misc_feature 96, 97, 98, 99, 100, 101: n = A,T,C or G
gactggaagagcactgttaaaaaccccgacacttaccccttaaactcgttggaggctcatcgttcctattcaggcagatgttatcgaggtccgacnnnnnntactcctaacccgcatacccaaaaagatcggatacgcatgaggct

SEQ ID NO: 120 - DNA, 146 bp, Artificial Sequence
  Bisulfite Padlock Probe
  misc_feature 96, 97, 98, 99, 100, 101: n = A,T,C or G
gactggaagagcactgttaaaaaccccgacgcttaccccttaaactcgttggaggctcatcgttcctattcaggcagatgttatcgaggtccgacnnnnnntactcctaacccgcgtacccaaaaagatcggatacgcatgaggct

SEQ ID NO: 121 - DNA, 146 bp, Artificial Sequence
  Bisulfite Padlock Probe
  misc_feature 96, 97, 98, 99, 100, 101: n = A,T,C or G
gactggaagagcactgttaaaaaccccgtcaaaatttaatcacctacgttggaggctcatcgttcctattcaggcagatgttatcgaggtccgacnnnnnnaaaaccaccaaaaaccccactcaccgatcggatacgcatgaggct

SEQ ID NO: 122 - DNA, 146 bp, Artificial Sequence
  Bisulfite Padlock Probe
  misc_feature 96, 97, 98, 99, 100, 101: n = A,T,C or G
gactggaagagcactgttaaaaaccccgtcgaaatttaatcacctacgttggaggctcatcgttcctattcaggcagatgttatcgaggtccgacnnnnnnaaaaccgccaaaaaccccactcaccgatcggatacgcatgaggct

SEQ ID NO: 123 - DNA, 146 bp, Artificial Sequence
  Bisulfite Padlock Probe
  misc_feature 95, 96, 97, 98, 99, 100: n = A,T,C or G
gactggaagagcactgttaaaaacccctaaaaaccttaaaaacctcgttggaggctcatcgttcctattcaggcagatgttatcgaggtccgacnnnnnnatcccaatccacaaccacctacacttgatcggatacgcatgaggct

SEQ ID NO: 124 - DNA, 146 bp, Artificial Sequence
  Bisulfite Padlock Probe
  misc_feature 95, 96, 97, 98, 99, 100: n = A,T,C or G
gactggaagagcactgttaaaaacccctaaaaaccttaaaaacctcgttggaggctcatcgttcctattcaggcagatgttatcgaggtccgacnnnnnnatcccaatccacgaccacctacacttgatcggatacgcatgaggct

SEQ ID NO: 125 - DNA, 146 bp, Artificial Sequence
  Bisulfite Padlock Probe
  misc_feature 92, 93, 94, 95, 96, 97: n = A,T,C or G
gactggaagagcactgttaaaaacccctaaactccctaaaaccgttggaggctcatcgttcctattcaggcagatgttatcgaggtccgacnnnnnnctcaaatacaaaccaacccctttttcatcgatcggatacgcatgaggct

SEQ ID NO: 126 - DNA, 146 bp, Artificial Sequence
  Bisulfite Padlock Probe
  misc_feature 96, 97, 98, 99, 100, 101: n = A,T,C or G
gactggaagagcactgttaaaaacccctaaccctaacaacccccaacgttggaggctcatcgttcctattcaggcagatgttatcgaggtccgacnnnnnnaaaaacctaccctccacctccaacagatcggatacgcatgaggct

SEQ ID NO: 127 - DNA, 146 bp, Artificial Sequence
  Bisulfite Padlock Probe
  misc_feature 96, 97, 98, 99, 100, 101: n = A,T,C or G
gactggaagagcactgttaaaaacccctaaccctaacaacccccaacgttggaggctcatcgttcctattcaggcagatgttatcgaggtccgacnnnnnnaaaaacctaccctccgcctccaacagatcggatacgcatgaggct

SEQ ID NO: 128 - DNA, 146 bp, Artificial Sequence
  Bisulfite Padlock Probe
  misc_feature 92, 93, 94, 95, 96, 97: n = A,T,C or G
gactggaagagcactgttaaaaacccgaaaatacaaacacaacgttggaggctcatcgttcctattcaggcagatgttatcgaggtccgacnnnnnnttaaaattaaaattcaaactcccaaattcgatcggatacgcatgaggct

SEQ ID NO: 129 - DNA, 146 bp, Artificial Sequence
  Bisulfite Padlock Probe
  misc_feature 92, 93, 94, 95, 96, 97: n = A,T,C or G
gactggaagagcactgttaaaaacccgaaaatacgaacacaacgttggaggctcatcgttcctattcaggcagatgttatcgaggtccgacnnnnnnttaaaattaaaattcgaactcccaaattcgatcggatacgcatgaggct

SEQ ID NO: 130 - DNA, 146 bp, Artificial Sequence
  Bisulfite Padlock Probe
  misc_feature 93, 94, 95, 96, 97, 98: n = A,T,C or G
gactggaagagcactgttaaaaacccgaaacctaaccaaataacgttggaggctcatcgttcctattcaggcagatgttatcgaggtccgacnnnnnnaaaaacgaaacgacgacgcacataaaaagatcggatacgcatgaggct

SEQ ID NO: 131 - DNA, 146 bp, Artificial Sequence
  Bisulfite Padlock Probe
  misc_feature 93, 94, 95, 96, 97, 98: n = A,T,C or G
gactggaagagcactgttaaaaacccgaaacctaaccgaataacgttggaggctcatcgttcctattcaggcagatgttatcgaggtccgacnnnnnnaaaaacgaaacgacgacgcacgtaaaaagatcggatacgcatgaggct

SEQ ID NO: 132 - DNA, 146 bp, Artificial Sequence
  Bisulfite Padlock Probe
  misc_feature 96, 97, 98, 99, 100, 101: n = A,T,C or G
gactggaagagcactgttaaaaacccgaaacgaacgcaaaaacaaaagttggaggctcatcgttcctattcaggcagatgttatcgaggtccgacnnnnnnctttcgaaaacccccaaacgcatccgatcggatacgcatgaggct

SEQ ID NO: 133 - DNA, 146 bp, Artificial Sequence
  Bisulfite Padlock Probe
  misc_feature 96, 97, 98, 99, 100, 101: n = A,T,C or G
gactggaagagcactgttaaaaacccgaaacgaacgcaaaaacgaaagttggaggctcatcgttcctattcaggcagatgttatcgaggtccgacnnnnnnctttcgaaaacccccaaacgcgtccgatcggatacgcatgaggct

SEQ ID NO: 134 - DNA, 146 bp, Artificial Sequence
  Bisulfite Padlock Probe
  misc_feature 93, 94, 95, 96, 97, 98: n = A,T,C or G
gactggaagagcactgttaaaaacccgaaccaacatccccaatcgttggaggctcatcgttcctattcaggcagatgttatcgaggtccgacnnnnnnccgccgaatactcgtccgaaaaataacggatcggatacgcatgaggct

SEQ ID NO: 135 - DNA, 146 bp, Artificial Sequence
  Bisulfite Padlock Probe
  misc_feature 92, 93, 94, 95, 96, 97: n = A,T,C or G
gactggaagagcactgttaaaaacccgaacgcttatcctacacgttggaggctcatcgttcctattcaggcagatgttatcgaggtccgacnnnnnnccaaataaataaacttaaaataaaaacaagatcggatacgcatgaggct

SEQ ID NO: 136 - DNA, 146 bp, Artificial Sequence
  Bisulfite Padlock Probe
  misc_feature 92, 93, 94, 95, 96, 97: n = A,T,C or G
gactggaagagcactgttaaaaacccgaacgcttatcctacgcgttggaggctcatcgttcctattcaggcagatgttatcgaggtccgacnnnnnnccaaataaataaacttaaaataaaaacgagatcggatacgcatgaggct

SEQ ID NO: 137 - DNA, 146 bp, Artificial Sequence
  Bisulfite Padlock Probe
  misc_feature 92, 93, 94, 95, 96, 97: n = A,T,C or G
gactggaagagcactgttaaaaacccgaccataaaaccaccctgttggaggctcatcgttcctattcaggcagatgttatcgaggtccgacnnnnnncaatctcgaaacctctaacaccgacgacagatcggatacgcatgaggct

SEQ ID NO: 138 - DNA, 146 bp, Artificial Sequence
  Bisulfite Padlock Probe
  misc_feature 92, 93, 94, 95, 96, 97: n = A,T,C or G
gactggaagagcactgttaaaaacccgaccataaaaccgccctgttggaggctcatcgttcctattcaggcagatgttatcgaggtccgacnnnnnncaatctcgaaacctctaacaccgacgacggatcggatacgcatgaggct

SEQ ID NO: 139 - DNA, 146 bp, Artificial Sequence
  Bisulfite Padlock Probe
  misc_feature 96, 97, 98, 99, 100, 101: n = A,T,C or G
gactggaagagcactgttaaaaacccgactaataaaaccacaaccaagttggaggctcatcgttcctattcaggcagatgttatcgaggtccgacnnnnnngacaaacgaacgaaaacgcaaccccgatcggatacgcatgaggct

SEQ ID NO: 140 - DNA, 146 bp, Artificial Sequence
  Bisulfite Padlock Probe
  misc_feature 96, 97, 98, 99, 100, 101: n = A,T,C or G
gactggaagagcactgttaaaaacccgactaataaaaccgcaaccaagttggaggctcatcgttcctattcaggcagatgttatcgaggtccgacnnnnnngacaaacgaacgaaaacgcgaccccgatcggatacgcatgaggct

SEQ ID NO: 141 - DNA, 146 bp, Artificial Sequence
  Bisulfite Padlock Probe
  misc_feature 92, 93, 94, 95, 96, 97: n = A,T,C or G
gactggaagagcactgttaaaaacccgtaaacccataactaaagttggaggctcatcgttcctattcaggcagatgttatcgaggtccgacnnnnnncccctccccgaacaaccaataccaaataagatcggatacgcatgaggct

SEQ ID NO: 142 - DNA, 146 bp, Artificial Sequence
  Bisulfite Padlock Probe
  misc_feature 92, 93, 94, 95, 96, 97: n = A,T,C or G
gactggaagagcactgttaaaaaccctaaaccgctaaacgcatgttggaggctcatcgttcctattcaggcagatgttatcgaggtccgacnnnnnntaaccaacaaaaacaatctcctttacaacgatcggatacgcatgaggct

SEQ ID NO: 143 - DNA, 146 bp, Artificial Sequence
  Bisulfite Padlock Probe
  misc_feature 92, 93, 94, 95, 96, 97: n = A,T,C or G
gactggaagagcactgttaaaaaccctaaaccgctaaacgcgtgttggaggctcatcgttcctattcaggcagatgttatcgaggtccgacnnnnnntaaccaacaaaaacgatctcctttacaacgatcggatacgcatgaggct

SEQ ID NO: 144 - DNA, 146 bp, Artificial Sequence
  Bisulfite Padlock Probe
  misc_feature 96, 97, 98, 99, 100, 101: n = A,T,C or G
gactggaagagcactgttaaaaaccctaatatatcccatacactcaagttggaggctcatcgttcctattcaggcagatgttatcgaggtccgacnnnnnngaacgcttcctcctcactcactcacgatcggatacgcatgaggct

SEQ ID NO: 145 - DNA, 146 bp, Artificial Sequence
  Bisulfite Padlock Probe
  misc_feature 96, 97, 98, 99, 100, 101: n = A,T,C or G
gactggaagagcactgttaaaaaccctaatatatcccatacactcaagttggaggctcatcgttcctattcaggcagatgttatcgaggtccgacnnnnnngaacgcttcctcctcgctcactcacgatcggatacgcatgaggct

SEQ ID NO: 146 - DNA, 146 bp, Artificial Sequence
  Bisulfite Padlock Probe
  misc_feature 92, 93, 94, 95, 96, 97: n = A,T,C or G
gactggaagagcactgttaaaaaccctaccaaaaaccaaaaacgttggaggctcatcgttcctattcaggcagatgttatcgaggtccgacnnnnnnaaaccgaataacccaaaaccaaccaaaaagatcggatacgcatgaggct

SEQ ID NO: 147 - DNA, 146 bp, Artificial Sequence
  Bisulfite Padlock Probe
  misc_feature 92, 93, 94, 95, 96, 97: n = A,T,C or G
gactggaagagcactgttaaaaaccctaccaaaaaccaaaaacgttggaggctcatcgttcctattcaggcagatgttatcgaggtccgacnnnnnnaaaccgaataacccgaaaccaaccaaaaagatcggatacgcatgaggct

SEQ ID NO: 148 - DNA, 146 bp, Artificial Sequence
  Bisulfite Padlock Probe
  misc_feature 93, 94, 95, 96, 97, 98: n = A,T,C or G
gactggaagagcactgttaaaaaccctatcccattacaaaacttgttggaggctcatcgttcctattcaggcagatgttatcgaggtccgacnnnnnnaaacaataactctaaaatctcctctaccgatcggatacgcatgaggct

SEQ ID NO: 149 - DNA, 146 bp, Artificial Sequence
  Bisulfite Padlock Probe
  misc_feature 93, 94, 95, 96, 97, 98: n = A,T,C or G
gactggaagagcactgttaaaaaccctcaatcctaaactctaatgttggaggctcatcgttcctattcaggcagatgttatcgaggtccgacnnnnnnaaaacccaataaactataaaaacctaccgatcggatacgcatgaggct

SEQ ID NO: 150 - DNA, 146 bp, Artificial Sequence
  Bisulfite Padlock Probe
  misc_feature 93, 94, 95, 96, 97, 98: n = A,T,C or G
gactggaagagcactgttaaaaaccctcaatcctaaactctaatgttggaggctcatcgttcctattcaggcagatgttatcgaggtccgacnnnnnnaaaacccgataaactataaaaacctaccgatcggatacgcatgaggct

SEQ ID NO: 151 - DNA, 146 bp, Artificial Sequence
  Bisulfite Padlock Probe
  misc_feature 95, 96, 97, 98, 99, 100: n = A,T,C or G
gactggaagagcactgttaaaaaccctcccaactatacgctctcaagttggaggctcatcgttcctattcaggcagatgttatcgaggtccgacnnnnnntttatacgcgcccgcgcaatctatacgatcggatacgcatgaggct

SEQ ID NO: 152 - DNA, 146 bp, Artificial Sequence
  Bisulfite Padlock Probe
  misc_feature 95, 96, 97, 98, 99, 100: n = A,T,C or G
gactggaagagcactgttaaaaaccctcccaactatacgctctcgagttggaggctcatcgttcctattcaggcagatgttatcgaggtccgacnnnnnntttatacgcgcccgcgcgatctatacgatcggatacgcatgaggct

SEQ ID NO: 153 - DNA, 146 bp, Artificial Sequence
  Bisulfite Padlock Probe
  misc_feature 92, 93, 94, 95, 96, 97: n = A,T,C or G
gactggaagagcactgttaaaaaccgaaaaacaaaaataaaaagttggaggctcatcgttcctattcaggcagatgttatcgaggtccgacnnnnnncaataaacgaccgcgacgaacgaaacaaagatcggatacgcatgaggct

SEQ ID NO: 154 - DNA, 146 bp, Artificial Sequence
  Bisulfite Padlock Probe
  misc_feature 96, 97, 98, 99, 100, 101: n = A,T,C or G
gactggaagagcactgttaaaaaccgaaaacactaaatccctaaaacgttggaggctcatcgttcctattcaggcagatgttatcgaggtccgacnnnnnnaaccaaaccaaatccacccaatctcgatcggatacgcatgaggct

SEQ ID NO: 155 - DNA, 146 bp, Artificial Sequence
  Bisulfite Padlock Probe
  misc_feature 96, 97, 98, 99, 100, 101: n = A,T,C or G
gactggaagagcactgttaaaaaccgaaaacgctaaatccctaaaacgttggaggctcatcgttcctattcaggcagatgttatcgaggtccgacnnnnnnaaccaaaccgaatccacccaatctcgatcggatacgcatgaggct

SEQ ID NO: 156 - DNA, 146 bp, Artificial Sequence
  Bisulfite Padlock Probe
  misc_feature 93, 94, 95, 96, 97, 98: n = A,T,C or G
gactggaagagcactgttaaaaaccgaaacaacaaaaataaaaagttggaggctcatcgttcctattcaggcagatgttatcgaggtccgacnnnnnngcaaactaaaactcgaaaacgcataaccgatcggatacgcatgaggct

SEQ ID NO: 157 - DNA, 146 bp, Artificial Sequence
  Bisulfite Padlock Probe
  misc_feature 94, 95, 96, 97, 98, 99: n = A,T,C or G
gactggaagagcactgttaaaaaccgaaaccactaaataaaacccgttggaggctcatcgttcctattcaggcagatgttatcgaggtccgacnnnnnnatccctactaccgcctcccctactatcgatcggatacgcatgaggct

SEQ ID NO: 158 - DNA, 146 bp, Artificial Sequence
  Bisulfite Padlock Probe
  misc_feature 95, 96, 97, 98, 99, 100: n = A,T,C or G
gactggaagagcactgttaaaaaccgaacacctctaaaatcctcccgttggaggctcatcgttcctattcaggcagatgttatcgaggtccgacnnnnnntattccaatacgaccacgacacatacgatcggatacgcatgaggct

SEQ ID NO: 159 - DNA, 146 bp, Artificial Sequence
  Bisulfite Padlock Probe
  misc_feature 92, 93, 94, 95, 96, 97: n = A,T,C or G
gactggaagagcactgttaaaaaccgaaccctacctacaccccgttggaggctcatcgttcctattcaggcagatgttatcgaggtccgacnnnnnnaataaaaatccgcaaactccaaatccccagatcggatacgcatgaggct

SEQ ID NO: 160 - DNA, 146 bp, Artificial Sequence
  Bisulfite Padlock Probe
  misc_feature 92, 93, 94, 95, 96, 97: n = A,T,C or G
gactggaagagcactgttaaaaaccgaaccctacctacgccccgttggaggctcatcgttcctattcaggcagatgttatcgaggtccgacnnnnnnaataaaaatccgcaaactccgaatccccagatcggatacgcatgaggct

SEQ ID NO: 161 - DNA, 146 bp, Artificial Sequence
  Bisulfite Padlock Probe
  misc_feature 95, 96, 97, 98, 99, 100: n = A,T,C or G
gactggaagagcactgttaaaaaccgaacgcctctaaaatcctcccgttggaggctcatcgttcctattcaggcagatgttatcgaggtccgacnnnnnntattccaatacgaccacgacgcatacgatcggatacgcatgaggct

SEQ ID NO: 162 - DNA, 146 bp, Artificial Sequence
  Bisulfite Padlock Probe
  misc_feature 92, 93, 94, 95, 96, 97: n = A,T,C or G
gactggaagagcactgttaaaaaccgccaaaaacgcaaaaaacgttggaggctcatcgttcctattcaggcagatgttatcgaggtccgacnnnnnnccacaactctttccccctctctaaaacaagatcggatacgcatgaggct

SEQ ID NO: 163 - DNA, 146 bp, Artificial Sequence
  Bisulfite Padlock Probe
  misc_feature 92, 93, 94, 95, 96, 97: n = A,T,C or G
gactggaagagcactgttaaaaaccgccaaaaacgcgaaaaacgttggaggctcatcgttcctattcaggcagatgttatcgaggtccgacnnnnnnccgcaactctttccccctctctaaaacaagatcggatacgcatgaggct

SEQ ID NO: 164 - DNA, 146 bp, Artificial Sequence
  Bisulfite Padlock Probe
  misc_feature 92, 93, 94, 95, 96, 97: n = A,T,C or G
gactggaagagcactgttaaaaaccgccaacctctataaaaacgttggaggctcatcgttcctattcaggcagatgttatcgaggtccgacnnnnnntacttaaattaaatttcctcccgcacctagatcggatacgcatgaggct

SEQ ID NO: 165 - DNA, 146 bp, Artificial Sequence
  Bisulfite Padlock Probe
  misc_feature 92, 93, 94, 95, 96, 97: n = A,T,C or G
gactggaagagcactgttaaaaaccgccgacctctataaaaacgttggaggctcatcgttcctattcaggcagatgttatcgaggtccgacnnnnnntacttaaattaaatttcctcccgcgcctagatcggatacgcatgaggct

SEQ ID NO: 166 - DNA, 146 bp, Artificial Sequence
  Bisulfite Padlock Probe
  misc_feature 96, 97, 98, 99, 100, 101: n = A,T,C or G
gactggaagagcactgttaaaaaccgcgataaaaacgaaaacgcaaagttggaggctcatcgttcctattcaggcagatgttatcgaggtccgacnnnnnnctcgaacgtaacaaacaatcgccaagatcggatacgcatgaggct

SEQ ID NO: 167 - DNA, 146 bp, Artificial Sequence
  Bisulfite Padlock Probe
  misc_feature 96, 97, 98, 99, 100, 101: n = A,T,C or G
gactggaagagcactgttaaaaaccgcgataaaaacgaaaacgcgaagttggaggctcatcgttcctattcaggcagatgttatcgaggtccgacnnnnnnctcgaacgtaacaaacaatcgccgagatcggatacgcatgaggct

SEQ ID NO: 168 - DNA, 146 bp, Artificial Sequence
  Bisulfite Padlock Probe
  misc_feature 96, 97, 98, 99, 100, 101: n = A,T,C or G
gactggaagagcactgttaaaaaccgctacgaaatctcccactactcgttggaggctcatcgttcctattcaggcagatgttatcgaggtccgacnnnnnncttccttcaaaaatttacataaaaagatcggatacgcatgaggct

SEQ ID NO: 169 - DNA, 146 bp, Artificial Sequence
  Bisulfite Padlock Probe
  misc_feature 96, 97, 98, 99, 100, 101: n = A,T,C or G
gactggaagagcactgttaaaaaccgctacgaaatctcccgctactcgttggaggctcatcgttcctattcaggcagatgttatcgaggtccgacnnnnnncttccttcaaaaatttacataaaaagatcggatacgcatgaggct

SEQ ID NO: 170 - DNA, 146 bp, Artificial Sequence
  Bisulfite Padlock Probe
  misc_feature 92, 93, 94, 95, 96, 97: n = A,T,C or G
gactggaagagcactgttaaaaaccgtaacaaataacaatacagttggaggctcatcgttcctattcaggcagatgttatcgaggtccgacnnnnnntaccctattaaaatcactctctaacccccgatcggatacgcatgaggct

SEQ ID NO: 171 - DNA, 146 bp, Artificial Sequence
  Bisulfite Padlock Probe
  misc_feature 92, 93, 94, 95, 96, 97: n = A,T,C or G
gactggaagagcactgttaaaaaccgtaacaaataacaatacggttggaggctcatcgttcctattcaggcagatgttatcgaggtccgacnnnnnntaccctattaaaatcgctctctaacccccgatcggatacgcatgaggct

SEQ ID NO: 172 - DNA, 146 bp, Artificial Sequence
  Bisulfite Padlock Probe
  misc_feature 95, 96, 97, 98, 99, 100: n = A,T,C or G
gactggaagagcactgttaaaaaccgttaaacgatataaccccaaagttggaggctcatcgttcctattcaggcagatgttatcgaggtccgacnnnnnnaaaactcccgcgaacaacgcaaaaaagatcggatacgcatgaggct

SEQ ID NO: 173 - DNA, 146 bp, Artificial Sequence
  Bisulfite Padlock Probe
  misc_feature 95, 96, 97, 98, 99, 100: n = A,T,C or G
gactggaagagcactgttaaaaaccgttaaacgatataaccccgaagttggaggctcatcgttcctattcaggcagatgttatcgaggtccgacnnnnnnaaaactcccgcgaacaacgcgaaaaagatcggatacgcatgaggct

SEQ ID NO: 174 - DNA, 146 bp, Artificial Sequence
  Bisulfite Padlock Probe
  misc_feature 95, 96, 97, 98, 99, 100: n = A,T,C or G
gactggaagagcactgttaaaaaccgtttcccttacaatctaaaaagttggaggctcatcgttcctattcaggcagatgttatcgaggtccgacnnnnnnccccttctccaatccgcgctaaacaagatcggatacgcatgaggct

SEQ ID NO: 175 - DNA, 146 bp, Artificial Sequence
  Bisulfite Padlock Probe
  misc_feature 92, 93, 94, 95, 96, 97: n = A,T,C or G
gactggaagagcactgttaaaaacctaaccacccaattactaagttggaggctcatcgttcctattcaggcagatgttatcgaggtccgacnnnnnnccaaaaacttcccgacctcaacataaaacgatcggatacgcatgaggct

SEQ ID NO: 176 - DNA, 146 bp, Artificial Sequence
  Bisulfite Padlock Probe
  misc_feature 92, 93, 94, 95, 96, 97: n = A,T,C or G
gactggaagagcactgttaaaaacctaaccacccaattactaagttggaggctcatcgttcctattcaggcagatgttatcgaggtccgacnnnnnnccaaaaacttcccgacctcaacgtaaaacgatcggatacgcatgaggct

SEQ ID NO: 177 - DNA, 146 bp, Artificial Sequence
  Bisulfite Padlock Probe
  misc_feature 94, 95, 96, 97, 98, 99: n = A,T,C or G
gactggaagagcactgttaaaaacctaatctacgaacaacaaaaagttggaggctcatcgttcctattcaggcagatgttatcgaggtccgacnnnnnnaacccaacaataacacccaaactatacgatcggatacgcatgaggct

SEQ ID NO: 178 - DNA, 146 bp, Artificial Sequence
  Bisulfite Padlock Probe
  misc_feature 94, 95, 96, 97, 98, 99: n = A,T,C or G
gactggaagagcactgttaaaaacctaatctacgaacgacaaaaagttggaggctcatcgttcctattcaggcagatgttatcgaggtccgacnnnnnnaacccgacaataacacccaaactatacgatcggatacgcatgaggct

SEQ ID NO: 179 - DNA, 146 bp, Artificial Sequence
  Bisulfite Padlock Probe
  misc_feature 96, 97, 98, 99, 100, 101: n = A,T,C or G
gactggaagagcactgttaaaaacctacgaacctaataccacacctagttggaggctcatcgttcctattcaggcagatgttatcgaggtccgacnnnnnncttaacacccaaattctaccactccgatcggatacgcatgaggct

SEQ ID NO: 180 - DNA, 146 bp, Artificial Sequence
  Bisulfite Padlock Probe
  misc_feature 96, 97, 98, 99, 100, 101: n = A,T,C or G
gactggaagagcactgttaaaaacctacgaacctaataccgcacctagttggaggctcatcgttcctattcaggcagatgttatcgaggtccgacnnnnnncttaacacccaaattctaccgctccgatcggatacgcatgaggct

SEQ ID NO: 181 - DNA, 146 bp, Artificial Sequence
  Bisulfite Padlock Probe
  misc_feature 93, 94, 95, 96, 97, 98: n = A,T,C or G
gactggaagagcactgttaaaaacctattctcgccgcacaaaacgttggaggctcatcgttcctattcaggcagatgttatcgaggtccgacnnnnnnaaccgaaaaacgaaaaaccaaaataaacgatcggatacgcatgaggct

SEQ ID NO: 182 - DNA, 146 bp, Artificial Sequence
  Bisulfite Padlock Probe
  misc_feature 93, 94, 95, 96, 97, 98: n = A,T,C or G
gactggaagagcactgttaaaaacctattctcgccgcgcaaaacgttggaggctcatcgttcctattcaggcagatgttatcgaggtccgacnnnnnnaaccgaaaaacgaaaaaccgaaataaacgatcggatacgcatgaggct

SEQ ID NO: 183 - DNA, 146 bp, Artificial Sequence
  Bisulfite Padlock Probe
  misc_feature 92, 93, 94, 95, 96, 97: n = A,T,C or G
gactggaagagcactgttaaaaacctcccgaaacaaaaccaacgttggaggctcatcgttcctattcaggcagatgttatcgaggtccgacnnnnnnccatcaacttccaaccacactacttacttgatcggatacgcatgaggct

SEQ ID NO: 184 - DNA, 146 bp, Artificial Sequence
  Bisulfite Padlock Probe
  misc_feature 92, 93, 94, 95, 96, 97: n = A,T,C or G
gactggaagagcactgttaaaaacctcccgaaacaaaaccgacgttggaggctcatcgttcctattcaggcagatgttatcgaggtccgacnnnnnnccatcaacttccaaccacgctacttacttgatcggatacgcatgaggct

SEQ ID NO: 185 - DNA, 146 bp, Artificial Sequence
  Bisulfite Padlock Probe
  misc_feature 92, 93, 94, 95, 96, 97: n = A,T,C or G
gactggaagagcactgttaaaaacctctaccctaccccgacacgttggaggctcatcgttcctattcaggcagatgttatcgaggtccgacnnnnnngaatataaccaacaacaaaaaccaaaaccgatcggatacgcatgaggct

SEQ ID NO: 186 - DNA, 146 bp, Artificial Sequence
  Bisulfite Padlock Probe
  misc_feature 92, 93, 94, 95, 96, 97: n = A,T,C or G
gactggaagagcactgttaaaaacctctaccctaccccgacgcgttggaggctcatcgttcctattcaggcagatgttatcgaggtccgacnnnnnngaatataaccaacaacgaaaaccaaaaccgatcggatacgcatgaggct

SEQ ID NO: 187 - DNA, 146 bp, Artificial Sequence
  Bisulfite Padlock Probe
  misc_feature 92, 93, 94, 95, 96, 97: n = A,T,C or G
gactggaagagcactgttaaaaaccttcctcccacaaaaccccgttggaggctcatcgttcctattcaggcagatgttatcgaggtccgacnnnnnnaaaacatattcccgaaatcattcacactagatcggatacgcatgaggct

SEQ ID NO: 188 - DNA, 146 bp, Artificial Sequence
  Bisulfite Padlock Probe
  misc_feature 92, 93, 94, 95, 96, 97: n = A,T,C or G
gactggaagagcactgttaaaaaccttcctcccgcaaaaccccgttggaggctcatcgttcctattcaggcagatgttatcgaggtccgacnnnnnnaaaacatattcccgaaatcgttcacactagatcggatacgcatgaggct

SEQ ID NO: 189 - DNA, 146 bp, Artificial Sequence
  Bisulfite Padlock Probe
  misc_feature 93, 94, 95, 96, 97, 98: n = A,T,C or G
gactggaagagcactgttaaaaaccttcttcctcctcattccccgttggaggctcatcgttcctattcaggcagatgttatcgaggtccgacnnnnnnaaaacgaaaaccacccacaaaatccaacgatcggatacgcatgaggct

SEQ ID NO: 190 - DNA, 146 bp, Artificial Sequence
  Bisulfite Padlock Probe
  misc_feature 93, 94, 95, 96, 97, 98: n = A,T,C or G
gactggaagagcactgttaaaaaccttcttcctcctcattccccgttggaggctcatcgttcctattcaggcagatgttatcgaggtccgacnnnnnnaaaacgaaaaccacccacgaaatccaacgatcggatacgcatgaggct

SEQ ID NO: 191 - DNA, 146 bp, Artificial Sequence
  Bisulfite Padlock Probe
  misc_feature 96, 97, 98, 99, 100, 101: n = A,T,C or G
gactggaagagcactgttaaaaacgaaaacaaactatatcaattcccgttggaggctcatcgttcctattcaggcagatgttatcgaggtccgacnnnnnnacgaccgaaaactactctacgcaccgatcggatacgcatgaggct

SEQ ID NO: 192 - DNA, 146 bp, Artificial Sequence
  Bisulfite Padlock Probe
  misc_feature 96, 97, 98, 99, 100, 101: n = A,T,C or G
gactggaagagcactgttaaaaacgaaaacaaactatatcgattcccgttggaggctcatcgttcctattcaggcagatgttatcgaggtccgacnnnnnnacgaccgaaaactactctacgcgccgatcggatacgcatgaggct

SEQ ID NO: 193 - DNA, 146 bp, Artificial Sequence
  Bisulfite Padlock Probe
  misc_feature 96, 97, 98, 99, 100, 101: n = A,T,C or G
gactggaagagcactgttaaaaacgaaaaccccctcacctaatcctcgttggaggctcatcgttcctattcaggcagatgttatcgaggtccgacnnnnnnaaacctctctcgacgtcaatcttacgatcggatacgcatgaggct

SEQ ID NO: 194 - DNA, 146 bp, Artificial Sequence
  Bisulfite Padlock Probe
  misc_feature 95, 96, 97, 98, 99, 100: n = A,T,C or G
gactggaagagcactgttaaaaacgaaaacgacataatcaaaatacgttggaggctcatcgttcctattcaggcagatgttatcgaggtccgacnnnnnnaaatctctatcacactactaaaaattgatcggatacgcatgaggct

SEQ ID NO: 195 - DNA, 146 bp, Artificial Sequence
  Bisulfite Padlock Probe
  misc_feature 95, 96, 97, 98, 99, 100: n = A,T,C or G
gactggaagagcactgttaaaaacgaaaacgacgtaatcaaaatacgttggaggctcatcgttcctattcaggcagatgttatcgaggtccgacnnnnnnaaatctctatcgcactactaaaaattgatcggatacgcatgaggct

SEQ ID NO: 196 - DNA, 146 bp, Artificial Sequence
  Bisulfite Padlock Probe
  misc_feature 92, 93, 94, 95, 96, 97: n = A,T,C or G
gactggaagagcactgttaaaaacgaaaacgcgtaacaatactgttggaggctcatcgttcctattcaggcagatgttatcgaggtccgacnnnnnnctaatatccgaacgtcgcaaaaccccaaagatcggatacgcatgaggct

SEQ ID NO: 197 - DNA, 146 bp, Artificial Sequence
  Bisulfite Padlock Probe
  misc_feature 92, 93, 94, 95, 96, 97: n = A,T,C or G
gactggaagagcactgttaaaaacgaaaacgcgtaacgatactgttggaggctcatcgttcctattcaggcagatgttatcgaggtccgacnnnnnnctaatatccgaacgtcgcgaaaccccaaagatcggatacgcatgaggct

SEQ ID NO: 198 - DNA, 146 bp, Artificial Sequence
  Bisulfite Padlock Probe
  misc_feature 92, 93, 94, 95, 96, 97: n = A,T,C or G
gactggaagagcactgttaaaaacgaaaactactacgacgcacgttggaggctcatcgttcctattcaggcagatgttatcgaggtccgacnnnnnnaaaaacaatacgacgaacgacgacgacaagatcggatacgcatgaggct

SEQ ID NO: 199 - DNA, 146 bp, Artificial Sequence
  Bisulfite Padlock Probe
  misc_feature 92, 93, 94, 95, 96, 97: n = A,T,C or G
gactggaagagcactgttaaaaacgaaaactactacgacgcgcgttggaggctcatcgttcctattcaggcagatgttatcgaggtccgacnnnnnnaaaaacaatacgacgaacgacgacgacgagatcggatacgcatgaggct

SEQ ID NO: 200 - DNA, 146 bp, Artificial Sequence
  Bisulfite Padlock Probe
  misc_feature 93, 94, 95, 96, 97, 98: n = A,T,C or G
gactggaagagcactgttaaaaacgaaaataaatacgaaaccacgttggaggctcatcgttcctattcaggcagatgttatcgaggtccgacnnnnnnaaccgaccaaaacaaacacttaacactcgatcggatacgcatgaggct

SEQ ID NO: 201 - DNA, 146 bp, Artificial Sequence
  Bisulfite Padlock Probe
  misc_feature 93, 94, 95, 96, 97, 98: n = A,T,C or G
gactggaagagcactgttaaaaacgaaaataaatacgaaaccgcgttggaggctcatcgttcctattcaggcagatgttatcgaggtccgacnnnnnnaaccgaccaaaacgaacacttaacactcgatcggatacgcatgaggct

SEQ ID NO: 202 - DNA, 146 bp, Artificial Sequence
  Bisulfite Padlock Probe
  misc_feature 93, 94, 95, 96, 97, 98: n = A,T,C or G
gactggaagagcactgttaaaaacgaaaatcgtacgcacaaaaagttggaggctcatcgttcctattcaggcagatgttatcgaggtccgacnnnnnntctacaaaaacaaccaaataaacgcaaagatcggatacgcatgaggct

SEQ ID NO: 203 - DNA, 146 bp, Artificial Sequence
  Bisulfite Padlock Probe
  misc_feature 93, 94, 95, 96, 97, 98: n = A,T,C or G
gactggaagagcactgttaaaaacgaaaatcgtacgcgcaaaaagttggaggctcatcgttcctattcaggcagatgttatcgaggtccgacnnnnnntctacaaaaacaaccaaataaacgcgaagatcggatacgcatgaggct

SEQ ID NO: 204 - DNA, 146 bp, Artificial Sequence
  Bisulfite Padlock Probe
  misc_feature 94, 95, 96, 97, 98, 99: n = A,T,C or G
gactggaagagcactgttaaaaacgaaacaaccccaacaaaaaccgttggaggctcatcgttcctattcaggcagatgttatcgaggtccgacnnnnnntctaccccgaaaacgaaccacgatctagatcggatacgcatgaggct

SEQ ID NO: 205 - DNA, 146 bp, Artificial Sequence
  Bisulfite Padlock Probe
  misc_feature 92, 93, 94, 95, 96, 97: n = A,T,C or G
gactggaagagcactgttaaaaacgaaaccaaactaccctaacgttggaggctcatcgttcctattcaggcagatgttatcgaggtccgacnnnnnnaactccaaaaaccacctaacccaaaacccgatcggatacgcatgaggct

SEQ ID NO: 206 - DNA, 146 bp, Artificial Sequence
  Bisulfite Padlock Probe
  misc_feature 92, 93, 94, 95, 96, 97: n = A,T,C or G
gactggaagagcactgttaaaaacgaaacccaaaactccaaccgttggaggctcatcgttcctattcaggcagatgttatcgaggtccgacnnnnnnaaaaactcctccaaatacgatcgacgcccgatcggatacgcatgaggct

SEQ ID NO: 207 - DNA, 146 bp, Artificial Sequence
  Bisulfite Padlock Probe
  misc_feature 92, 93, 94, 95, 96, 97: n = A,T,C or G
gactggaagagcactgttaaaaacgaaacccgatcgaaccaacgttggaggctcatcgttcctattcaggcagatgttatcgaggtccgacnnnnnnaaaataactaataaaaaccaacccaaaaagatcggatacgcatgaggct

SEQ ID NO: 208 - DNA, 146 bp, Artificial Sequence
  Bisulfite Padlock Probe
  misc_feature 92, 93, 94, 95, 96, 97: n = A,T,C or G
gactggaagagcactgttaaaaacgaaacccgatcgaaccgacgttggaggctcatcgttcctattcaggcagatgttatcgaggtccgacnnnnnnaaaataactaataaaaaccgacccaaaaagatcggatacgcatgaggct

SEQ ID NO: 209 - DNA, 146 bp, Artificial Sequence
  Bisulfite Padlock Probe
  misc_feature 93, 94, 95, 96, 97, 98: n = A,T,C or G
gactggaagagcactgttaaaaacgaaaccgaacgcaaaaacacgttggaggctcatcgttcctattcaggcagatgttatcgaggtccgacnnnnnnatccccacaatactccaaaaaccaaaaagatcggatacgcatgaggct

SEQ ID NO: 210 - DNA, 146 bp, Artificial Sequence
  Bisulfite Padlock Probe
  misc_feature 93, 94, 95, 96, 97, 98: n = A,T,C or G
gactggaagagcactgttaaaaacgaaaccgaacgcaaaaacgcgttggaggctcatcgttcctattcaggcagatgttatcgaggtccgacnnnnnnatccccgcaatactccaaaaaccaaaaagatcggatacgcatgaggct

SEQ ID NO: 211 - DNA, 146 bp, Artificial Sequence
  Bisulfite Padlock Probe
  misc_feature 92, 93, 94, 95, 96, 97: n = A,T,C or G
gactggaagagcactgttaaaaacgaaaccgaactaccctaacgttggaggctcatcgttcctattcaggcagatgttatcgaggtccgacnnnnnnaactccgaaaaccacctaacccaaaacccgatcggatacgcatgaggct

SEQ ID NO: 212 - DNA, 146 bp, Artificial Sequence
  Bisulfite Padlock Probe
  misc_feature 96, 97, 98, 99, 100, 101: n = A,T,C or G
gactggaagagcactgttaaaaacgaaactccaattcgcaaattcccgttggaggctcatcgttcctattcaggcagatgttatcgaggtccgacnnnnnnaaaaccgaaacgactcccaaaacccgatcggatacgcatgaggct

SEQ ID NO: 213 - DNA, 146 bp, Artificial Sequence
  Bisulfite Padlock Probe
  misc_feature 96, 97, 98, 99, 100, 101: n = A,T,C or G
gactggaagagcactgttaaaaacgaaactccaattcgcgaattcccgttggaggctcatcgttcctattcaggcagatgttatcgaggtccgacnnnnnnaaaaccgaaacgactcccgaaacccgatcggatacgcatgaggct

SEQ ID NO: 214 - DNA, 146 bp, Artificial Sequence
  Bisulfite Padlock Probe
  misc_feature 96, 97, 98, 99, 100, 101: n = A,T,C or G
gactggaagagcactgttaaaaacgaaatccgtacaacaatttcctcgttggaggctcatcgttcctattcaggcagatgttatcgaggtccgacnnnnnnaaaataccatattaataccaaacccgatcggatacgcatgaggct

SEQ ID NO: 215 - DNA, 146 bp, Artificial Sequence
  Bisulfite Padlock Probe
  misc_feature 96, 97, 98, 99, 100, 101: n = A,T,C or G
gactggaagagcactgttaaaaacgaaatccgtacaacgatttcctcgttggaggctcatcgttcctattcaggcagatgttatcgaggtccgacnnnnnnaaaataccatattaataccaaacccgatcggatacgcatgaggct

SEQ ID NO: 216 - DNA, 146 bp, Artificial Sequence
  Bisulfite Padlock Probe
  misc_feature 92, 93, 94, 95, 96, 97: n = A,T,C or G
gactggaagagcactgttaaaaacgaaatctcctacatttcccgttggaggctcatcgttcctattcaggcagatgttatcgaggtccgacnnnnnnaaaactatttttcctccttattcctataagatcggatacgcatgaggct

SEQ ID NO: 217 - DNA, 146 bp, Artificial Sequence
  Bisulfite Padlock Probe
  misc_feature 92, 93, 94, 95, 96, 97: n = A,T,C or G
gactggaagagcactgttaaaaacgaaccaaaaccactaaatcgttggaggctcatcgttcctattcaggcagatgttatcgaggtccgacnnnnnnaaaaacacaattaaaaccgcaaaaatccagatcggatacgcatgaggct

SEQ ID NO: 218 - DNA, 146 bp, Artificial Sequence
  Bisulfite Padlock Probe
  misc_feature 92, 93, 94, 95, 96, 97: n = A,T,C or G
gactggaagagcactgttaaaaacgaaccaaaaccgctaaatcgttggaggctcatcgttcctattcaggcagatgttatcgaggtccgacnnnnnnaaaaacacaattaaaaccgcaaaaatccggatcggatacgcatgaggct

SEQ ID NO: 219 - DNA, 146 bp, Artificial Sequence
  Bisulfite Padlock Probe
  misc_feature 92, 93, 94, 95, 96, 97: n = A,T,C or G
gactggaagagcactgttaaaaacgaaccccgcataacacaacgttggaggctcatcgttcctattcaggcagatgttatcgaggtccgacnnnnnnacgaacatctaattctcaataatatctccgatcggatacgcatgaggct

SEQ ID NO: 220 - DNA, 146 bp, Artificial Sequence
  Bisulfite Padlock Probe
  misc_feature 92, 93, 94, 95, 96, 97: n = A,T,C or G
gactggaagagcactgttaaaaacgaaccccgcataacgcaacgttggaggctcatcgttcctattcaggcagatgttatcgaggtccgacnnnnnnacgaacatctaattctcgataatatctccgatcggatacgcatgaggct

SEQ ID NO: 221 - DNA, 146 bp, Artificial Sequence
  Bisulfite Padlock Probe
  misc_feature 94, 95, 96, 97, 98, 99: n = A,T,C or G
gactggaagagcactgttaaaaacgaacgacgaacgcttccaatcgttggaggctcatcgttcctattcaggcagatgttatcgaggtccgacnnnnnnattctacccacgacgacgaaaacgacagatcggatacgcatgaggct

SEQ ID NO: 222 - DNA, 146 bp, Artificial Sequence
  Bisulfite Padlock Probe
  misc_feature 94, 95, 96, 97, 98, 99: n = A,T,C or G
gactggaagagcactgttaaaaacgaacgacgaacgcttccgatcgttggaggctcatcgttcctattcaggcagatgttatcgaggtccgacnnnnnnattctacccacgacgacgaaaacgacggatcggatacgcatgaggct

SEQ ID NO: 223 - DNA, 146 bp, Artificial Sequence
  Bisulfite Padlock Probe
  misc_feature 95, 96, 97, 98, 99, 100: n = A,T,C or G
gactggaagagcactgttaaaaacgaacgcaatcaaactctacaaagttggaggctcatcgttcctattcaggcagatgttatcgaggtccgacnnnnnnctctcgaaaacgaaaacgcccaatccgatcggatacgcatgaggct

SEQ ID NO: 224 - DNA, 146 bp, Artificial Sequence
  Bisulfite Padlock Probe
  misc_feature 95, 96, 97, 98, 99, 100: n = A,T,C or G
gactggaagagcactgttaaaaacgaacgcaatcgaactctacaaagttggaggctcatcgttcctattcaggcagatgttatcgaggtccgacnnnnnnctctcgaaaacgaaaacgcccgatccgatcggatacgcatgaggct

SEQ ID NO: 225 - DNA, 146 bp, Artificial Sequence
  Bisulfite Padlock Probe
  misc_feature 92, 93, 94, 95, 96, 97: n = A,T,C or G
gactggaagagcactgttaaaaacgaccaccgacaaattctcagttggaggctcatcgttcctattcaggcagatgttatcgaggtccgacnnnnnntccgtaaataattctacaactcacaaacagatcggatacgcatgaggct

SEQ ID NO: 226 - DNA, 146 bp, Artificial Sequence
  Bisulfite Padlock Probe
  misc_feature 92, 93, 94, 95, 96, 97: n = A,T,C or G
gactggaagagcactgttaaaaacgaccaccgacaaattctcggttggaggctcatcgttcctattcaggcagatgttatcgaggtccgacnnnnnntccgtaaataattctacgactcacaaacagatcggatacgcatgaggct

SEQ ID NO: 227 - DNA, 146 bp, Artificial Sequence
  Bisulfite Padlock Probe
  misc_feature 96, 97, 98, 99, 100, 101: n = A,T,C or G
gactggaagagcactgttaaaaacgaccatacaacgcaaacttctccgttggaggctcatcgttcctattcaggcagatgttatcgaggtccgacnnnnnnaataaccttccgcgactacaacctagatcggatacgcatgaggct

SEQ ID NO: 228 - DNA, 146 bp, Artificial Sequence
  Bisulfite Padlock Probe
  misc_feature 96, 97, 98, 99, 100, 101: n = A,T,C or G
gactggaagagcactgttaaaaacgaccatacaacgcgaacttctccgttggaggctcatcgttcctattcaggcagatgttatcgaggtccgacnnnnnnaataaccttccgcgactacgacctagatcggatacgcatgaggct

SEQ ID NO: 229 - DNA, 146 bp, Artificial Sequence
  Bisulfite Padlock Probe
  misc_feature 92, 93, 94, 95, 96, 97: n = A,T,C or G
gactggaagagcactgttaaaaacgaccccatccaccacaaaagttggaggctcatcgttcctattcaggcagatgttatcgaggtccgacnnnnnnaactaaattaaaaacgaaaccaaaaactcgatcggatacgcatgaggct

SEQ ID NO: 230 - DNA, 146 bp, Artificial Sequence
  Bisulfite Padlock Probe
  misc_feature 92, 93, 94, 95, 96, 97: n = A,T,C or G
gactggaagagcactgttaaaaacgacccccaaaaacctaatagttggaggctcatcgttcctattcaggcagatgttatcgaggtccgacnnnnnnaccttttcttaaatacactactaaaaatcgatcggatacgcatgaggct

SEQ ID NO: 231 - DNA, 146 bp, Artificial Sequence
  Bisulfite Padlock Probe
  misc_feature 92, 93, 94, 95, 96, 97: n = A,T,C or G
gactggaagagcactgttaaaaacgacccccgaaaacctaatagttggaggctcatcgttcctattcaggcagatgttatcgaggtccgacnnnnnnaccttttcttaaatacgctactaaaaatcgatcggatacgcatgaggct

SEQ ID NO: 232 - DNA, 146 bp, Artificial Sequence
  Bisulfite Padlock Probe
  misc_feature 96, 97, 98, 99, 100, 101: n = A,T,C or G
gactggaagagcactgttaaaaacgaccccgaccaacaaactacttagttggaggctcatcgttcctattcaggcagatgttatcgaggtccgacnnnnnnaaaaataaacattaaaacaaccctcgatcggatacgcatgaggct

SEQ ID NO: 233 - DNA, 146 bp, Artificial Sequence
  Bisulfite Padlock Probe
  misc_feature 96, 97, 98, 99, 100, 101: n = A,T,C or G
gactggaagagcactgttaaaaacgaccccgaccgacaaactacttagttggaggctcatcgttcctattcaggcagatgttatcgaggtccgacnnnnnnaaaaataaacattaaaacaaccctcgatcggatacgcatgaggct

SEQ ID NO: 234 - DNA, 146 bp, Artificial Sequence
  Bisulfite Padlock Probe
  misc_feature 92, 93, 94, 95, 96, 97: n = A,T,C or G
gactggaagagcactgttaaaaacgaccgaaacctacgcactcgttggaggctcatcgttcctattcaggcagatgttatcgaggtccgacnnnnnnaaaaactaccccctccgctaaaactacacgatcggatacgcatgaggct

SEQ ID NO: 235 - DNA, 146 bp, Artificial Sequence
  Bisulfite Padlock Probe
  misc_feature 92, 93, 94, 95, 96, 97: n = A,T,C or G
gactggaagagcactgttaaaaacgaccgaaacctacgcgctcgttggaggctcatcgttcctattcaggcagatgttatcgaggtccgacnnnnnnaaaaactaccccctccgctaaaactacgcgatcggatacgcatgaggct

SEQ ID NO: 236 - DNA, 146 bp, Artificial Sequence
  Bisulfite Padlock Probe
  misc_feature 93, 94, 95, 96, 97, 98: n = A,T,C or G
gactggaagagcactgttaaaaacgaccgaaatccttaccaaccgttggaggctcatcgttcctattcaggcagatgttatcgaggtccgacnnnnnncctttaactctaaccgaataccaaactcgatcggatacgcatgaggct

SEQ ID NO: 237 - DNA, 146 bp, Artificial Sequence
  Bisulfite Padlock Probe
  misc_feature 93, 94, 95, 96, 97, 98: n = A,T,C or G
gactggaagagcactgttaaaaacgaccgaaatccttaccgaccgttggaggctcatcgttcctattcaggcagatgttatcgaggtccgacnnnnnncctttaactctaaccgaataccgaactcgatcggatacgcatgaggct

SEQ ID NO: 238 - DNA, 146 bp, Artificial Sequence
  Bisulfite Padlock Probe
  misc_feature 96, 97, 98, 99, 100, 101: n = A,T,C or G
gactggaagagcactgttaaaaacgaccgaaccaaataaaattcgcagttggaggctcatcgttcctattcaggcagatgttatcgaggtccgacnnnnnnccgaccccgctctaaacatcactacgatcggatacgcatgaggct

SEQ ID NO: 239 - DNA, 146 bp, Artificial Sequence
  Bisulfite Padlock Probe
  misc_feature 96, 97, 98, 99, 100, 101: n = A,T,C or G
gactggaagagcactgttaaaaacgaccgaaccaaataaaattcgcggttggaggctcatcgttcctattcaggcagatgttatcgaggtccgacnnnnnnccgaccccgctctaaacgtcactacgatcggatacgcatgaggct

SEQ ID NO: 240 - DNA, 146 bp, Artificial Sequence
  Bisulfite Padlock Probe
  misc_feature 94, 95, 96, 97, 98, 99: n = A,T,C or G
gactggaagagcactgttaaaaacgacctaaaaatcgaacaaaacgttggaggctcatcgttcctattcaggcagatgttatcgaggtccgacnnnnnnccataacctcaactcaacccataccccgatcggatacgcatgaggct

SEQ ID NO: 241 - DNA, 146 bp, Artificial Sequence
  Bisulfite Padlock Probe
  misc_feature 94, 95, 96, 97, 98, 99: n = A,T,C or G
gactggaagagcactgttaaaaacgacctaaaaatcgaacgaaacgttggaggctcatcgttcctattcaggcagatgttatcgaggtccgacnnnnnnccataacctcaactcgacccataccccgatcggatacgcatgaggct

SEQ ID NO: 242 - DNA, 146 bp, Artificial Sequence
  Bisulfite Padlock Probe
  misc_feature 96, 97, 98, 99, 100, 101: n = A,T,C or G
gactggaagagcactgttaaaaacgacgaaaccacgacgtataacaagttggaggctcatcgttcctattcaggcagatgttatcgaggtccgacnnnnnnctcatcccgaccgaaccaataacccgatcggatacgcatgaggct

SEQ ID NO: 243 - DNA, 146 bp, Artificial Sequence
  Bisulfite Padlock Probe
  misc_feature 96, 97, 98, 99, 100, 101: n = A,T,C or G
gactggaagagcactgttaaaaacgacgaaaccacgacgtataacgagttggaggctcatcgttcctattcaggcagatgttatcgaggtccgacnnnnnnctcatcccgaccgaaccgataacccgatcggatacgcatgaggct

SEQ ID NO: 244 - DNA, 146 bp, Artificial Sequence
  Bisulfite Padlock Probe
  misc_feature 93, 94, 95, 96, 97, 98: n = A,T,C or G
gactggaagagcactgttaaaaacgacgaacaaactaaacaaaagttggaggctcatcgttcctattcaggcagatgttatcgaggtccgacnnnnnntaaccctaaacgcacaaaaccccaaaaagatcggatacgcatgaggct

SEQ ID NO: 245 - DNA, 146 bp, Artificial Sequence
  Bisulfite Padlock Probe
  misc_feature 93, 94, 95, 96, 97, 98: n = A,T,C or G
gactggaagagcactgttaaaaacgacgaacgaactaaacaaaagttggaggctcatcgttcctattcaggcagatgttatcgaggtccgacnnnnnntaaccctaaacgcgcaaaaccccaaaaagatcggatacgcatgaggct

SEQ ID NO: 246 - DNA, 146 bp, Artificial Sequence
  Bisulfite Padlock Probe
  misc_feature 93, 94, 95, 96, 97, 98: n = A,T,C or G
gactggaagagcactgttaaaaacgacgacaacgcctacaaaacgttggaggctcatcgttcctattcaggcagatgttatcgaggtccgacnnnnnnaaacaacaacataaactcataaaaacaagatcggatacgcatgaggct

SEQ ID NO: 247 - DNA, 146 bp, Artificial Sequence
  Bisulfite Padlock Probe
  misc_feature 93, 94, 95, 96, 97, 98: n = A,T,C or G
gactggaagagcactgttaaaaacgacgacaacgcctacgaaacgttggaggctcatcgttcctattcaggcagatgttatcgaggtccgacnnnnnnaaacaacaacataaactcataaaaacaagatcggatacgcatgaggct

SEQ ID NO: 248 - DNA, 146 bp, Artificial Sequence
  Bisulfite Padlock Probe
  misc_feature 94, 95, 96, 97, 98, 99: n = A,T,C or G
gactggaagagcactgttaaaaacgacgacgaaacgaaaaacaaagttggaggctcatcgttcctattcaggcagatgttatcgaggtccgacnnnnnnaactcccgcccgataaacccataaaaagatcggatacgcatgaggct

SEQ ID NO: 249 - DNA, 146 bp, Artificial Sequence
  Bisulfite Padlock Probe
  misc_feature 94, 95, 96, 97, 98, 99: n = A,T,C or G
gactggaagagcactgttaaaaacgacgacgaaacgaaaaacgaagttggaggctcatcgttcctattcaggcagatgttatcgaggtccgacnnnnnnaactcccgcccgataaacccgtaaaaagatcggatacgcatgaggct

SEQ ID NO: 250 - DNA, 146 bp, Artificial Sequence
  Bisulfite Padlock Probe
  misc_feature 94, 95, 96, 97, 98, 99: n = A,T,C or G
gactggaagagcactgttaaaaacgacgataaacacctaccaaacgttggaggctcatcgttcctattcaggcagatgttatcgaggtccgacnnnnnnatctccgctaaaaacaaccaaaataacgatcggatacgcatgaggct

SEQ ID NO: 251 - DNA, 146 bp, Artificial Sequence
  Bisulfite Padlock Probe
  misc_feature 94, 95, 96, 97, 98, 99: n = A,T,C or G
gactggaagagcactgttaaaaacgacgataaacacctaccgaacgttggaggctcatcgttcctattcaggcagatgttatcgaggtccgacnnnnnnatctccgctaaaaacaaccgaaataacgatcggatacgcatgaggct

SEQ ID NO: 252 - DNA, 146 bp, Artificial Sequence
  Bisulfite Padlock Probe
  misc_feature 94, 95, 96, 97, 98, 99: n = A,T,C or G
gactggaagagcactgttaaaaacgacgatcgcaaaacaaaccccgttggaggctcatcgttcctattcaggcagatgttatcgaggtccgacnnnnnnaaccaaatccgaataaatccatcctccgatcggatacgcatgaggct

SEQ ID NO: 253 - DNA, 146 bp, Artificial Sequence
  Bisulfite Padlock Probe
  misc_feature 94, 95, 96, 97, 98, 99: n = A,T,C or G
gactggaagagcactgttaaaaacgacgatcgcaaaacgaaccccgttggaggctcatcgttcctattcaggcagatgttatcgaggtccgacnnnnnnaaccaaatccgaataaatccgtcctccgatcggatacgcatgaggct

SEQ ID NO: 254 - DNA, 146 bp, Artificial Sequence
  Bisulfite Padlock Probe
  misc_feature 92, 93, 94, 95, 96, 97: n = A,T,C or G
gactggaagagcactgttaaaaacgacgcatacaaccccacatgttggaggctcatcgttcctattcaggcagatgttatcgaggtccgacnnnnnnccaaaatctcctttaacctaaaaacaaatgatcggatacgcatgaggct

SEQ ID NO: 255 - DNA, 146 bp, Artificial Sequence
  Bisulfite Padlock Probe
  misc_feature 94, 95, 96, 97, 98, 99: n = A,T,C or G
gactggaagagcactgttaaaaacgacgcgacgaaaataacaaaagttggaggctcatcgttcctattcaggcagatgttatcgaggtccgacnnnnnnaaaaacccgaacacctaaaactaaaaagatcggatacgcatgaggct

SEQ ID NO: 256 - DNA, 146 bp, Artificial Sequence
  Bisulfite Padlock Probe
  misc_feature 94, 95, 96, 97, 98, 99: n = A,T,C or G
gactggaagagcactgttaaaaacgacgcgacgaaaataacgaaagttggaggctcatcgttcctattcaggcagatgttatcgaggtccgacnnnnnnaaaaacccgaacgcctaaaactaaaaagatcggatacgcatgaggct

SEQ ID NO: 257 - DNA, 146 bp, Artificial Sequence
  Bisulfite Padlock Probe
  misc_feature 92, 93, 94, 95, 96, 97: n = A,T,C or G
gactggaagagcactgttaaaaacgacgcgtacaaccccacatgttggaggctcatcgttcctattcaggcagatgttatcgaggtccgacnnnnnnccaaaatctcctttaacctaaaaacaaatgatcggatacgcatgaggct

SEQ ID NO: 258 - DNA, 146 bp, Artificial Sequence
  Bisulfite Padlock Probe
  misc_feature 92, 93, 94, 95, 96, 97: n = A,T,C or G
gactggaagagcactgttaaaaacgactaaacaacaaccccacgttggaggctcatcgttcctattcaggcagatgttatcgaggtccgacnnnnnnctaaaataaaccaaccaaaaccctccaaagatcggatacgcatgaggct

SEQ ID NO: 259 - DNA, 146 bp, Artificial Sequence
  Bisulfite Padlock Probe
  misc_feature 92, 93, 94, 95, 96, 97: n = A,T,C or G
gactggaagagcactgttaaaaacgactaaacaacgaccccacgttggaggctcatcgttcctattcaggcagatgttatcgaggtccgacnnnnnnctaaaataaaccgaccaaaaccctccaaagatcggatacgcatgaggct

SEQ ID NO: 260 - DNA, 146 bp, Artificial Sequence
  Bisulfite Padlock Probe
  misc_feature 93, 94, 95, 96, 97, 98: n = A,T,C or G
gactggaagagcactgttaaaaacgataaacaaactattaaaaagttggaggctcatcgttcctattcaggcagatgttatcgaggtccgacnnnnnnataatatactacgcccaaaaataaaatcgatcggatacgcatgaggct

SEQ ID NO: 261 - DNA, 146 bp, Artificial Sequence
  Bisulfite Padlock Probe
  misc_feature 92, 93, 94, 95, 96, 97: n = A,T,C or G
gactggaagagcactgttaaaaacgataaccccacaacaacaagttggaggctcatcgttcctattcaggcagatgttatcgaggtccgacnnnnnnaaaaatatccgactccaaaaacataaaccgatcggatacgcatgaggct

SEQ ID NO: 262 - DNA, 146 bp, Artificial Sequence
  Bisulfite Padlock Probe
  misc_feature 92, 93, 94, 95, 96, 97: n = A,T,C or G
gactggaagagcactgttaaaaacgataaccccgcaacaacaagttggaggctcatcgttcctattcaggcagatgttatcgaggtccgacnnnnnnaaaaatatccgactccaaaaacgtaaaccgatcggatacgcatgaggct

SEQ ID NO: 263 - DNA, 146 bp, Artificial Sequence
  Bisulfite Padlock Probe
  misc_feature 92, 93, 94, 95, 96, 97: n = A,T,C or G
gactggaagagcactgttaaaaacgataataaaaccctaacccgttggaggctcatcgttcctattcaggcagatgttatcgaggtccgacnnnnnnaaaaaccccgaactacaaatctccgaaccgatcggatacgcatgaggct

SEQ ID NO: 264 - DNA, 146 bp, Artificial Sequence
  Bisulfite Padlock Probe
  misc_feature 93, 94, 95, 96, 97, 98: n = A,T,C or G
gactggaagagcactgttaaaaacgataccgaactacgaaacacgttggaggctcatcgttcctattcaggcagatgttatcgaggtccgacnnnnnnaaaactacctaaaacaccgacccgcaacgatcggatacgcatgaggct

SEQ ID NO: 265 - DNA, 146 bp, Artificial Sequence
  Bisulfite Padlock Probe
  misc_feature 93, 94, 95, 96, 97, 98: n = A,T,C or G
gactggaagagcactgttaaaaacgataccgaactacgaaacgcgttggaggctcatcgttcctattcaggcagatgttatcgaggtccgacnnnnnnaaaactacctaaaacaccgacccgcgacgatcggatacgcatgaggct

SEQ ID NO: 266 - DNA, 146 bp, Artificial Sequence
  Bisulfite Padlock Probe
  misc_feature 92, 93, 94, 95, 96, 97: n = A,T,C or G
gactggaagagcactgttaaaaacgattaaaaaccccgaccacgttggaggctcatcgttcctattcaggcagatgttatcgaggtccgacnnnnnnaacgaaaaatttatacaaattaacaaaaagatcggatacgcatgaggct

SEQ ID NO: 267 - DNA, 146 bp, Artificial Sequence
  Bisulfite Padlock Probe
  misc_feature 92, 93, 94, 95, 96, 97: n = A,T,C or G
gactggaagagcactgttaaaaacgattaaaaaccccgaccgcgttggaggctcatcgttcctattcaggcagatgttatcgaggtccgacnnnnnnaacgaaaaatttatacaaattaacgaaaagatcggatacgcatgaggct

SEQ ID NO: 268 - DNA, 146 bp, Artificial Sequence
  Bisulfite Padlock Probe
  misc_feature 94, 95, 96, 97, 98, 99: n = A,T,C or G
gactggaagagcactgttaaaaacgatttatatctttctaaacaagttggaggctcatcgttcctattcaggcagatgttatcgaggtccgacnnnnnnacccctaccaatacccaaaacgccttcgatcggatacgcatgaggct

SEQ ID NO: 269 - DNA, 146 bp, Artificial Sequence
  Bisulfite Padlock Probe
  misc_feature 92, 93, 94, 95, 96, 97: n = A,T,C or G
gactggaagagcactgttaaaaacgcaaccccctccctaaatagttggaggctcatcgttcctattcaggcagatgttatcgaggtccgacnnnnnnccctccttcccaataacacaacaacttaagatcggatacgcatgaggct

SEQ ID NO: 270 - DNA, 146 bp, Artificial Sequence
  Bisulfite Padlock Probe
  misc_feature 92, 93, 94, 95, 96, 97: n = A,T,C or G
gactggaagagcactgttaaaaacgcactccataatcaaatacgttggaggctcatcgttcctattcaggcagatgttatcgaggtccgacnnnnnnacaaaaacaacacaactaaaacgcctacagatcggatacgcatgaggct

SEQ ID NO: 271 - DNA, 146 bp, Artificial Sequence
  Bisulfite Padlock Probe
  misc_feature 93, 94, 95, 96, 97, 98: n = A,T,C or G
gactggaagagcactgttaaaaacgccaacctaaacttctctcagttggaggctcatcgttcctattcaggcagatgttatcgaggtccgacnnnnnncttcccaaaacctcgccccaaaaaactagatcggatacgcatgaggct

SEQ ID NO: 272 - DNA, 146 bp, Artificial Sequence
  Bisulfite Padlock Probe
  misc_feature 93, 94, 95, 96, 97, 98: n = A,T,C or G
gactggaagagcactgttaaaaacgccaacctaaacttctctcggttggaggctcatcgttcctattcaggcagatgttatcgaggtccgacnnnnnncttcccaaaacctcgccccgaaaaactagatcggatacgcatgaggct

SEQ ID NO: 273 - DNA, 146 bp, Artificial Sequence
  Bisulfite Padlock Probe
  misc_feature 95, 96, 97, 98, 99, 100: n = A,T,C or G
gactggaagagcactgttaaaaacgccaacgaaaacataaactaacgttggaggctcatcgttcctattcaggcagatgttatcgaggtccgacnnnnnnaaatactaaaaatcctccctaccaccgatcggatacgcatgaggct

SEQ ID NO: 274 - DNA, 146 bp, Artificial Sequence
  Bisulfite Padlock Probe
  misc_feature 95, 96, 97, 98, 99, 100: n = A,T,C or G
gactggaagagcactgttaaaaacgccaacgaaaacgtaaactaacgttggaggctcatcgttcctattcaggcagatgttatcgaggtccgacnnnnnnaaatactaaaaatcctccctaccaccgatcggatacgcatgaggct

SEQ ID NO: 275 - DNA, 146 bp, Artificial Sequence
  Bisulfite Padlock Probe
  misc_feature 93, 94, 95, 96, 97, 98: n = A,T,C or G
gactggaagagcactgttaaaaacgccacaacccataacaatacgttggaggctcatcgttcctattcaggcagatgttatcgaggtccgacnnnnnnaaaaactaaaatcctcttttccacacttgatcggatacgcatgaggct

SEQ ID NO: 276 - DNA, 146 bp, Artificial Sequence
  Bisulfite Padlock Probe
  misc_feature 93, 94, 95, 96, 97, 98: n = A,T,C or G
gactggaagagcactgttaaaaacgccacaacccgtaacaatacgttggaggctcatcgttcctattcaggcagatgttatcgaggtccgacnnnnnnaaaaactaaaatcctcttttccgcacttgatcggatacgcatgaggct

SEQ ID NO: 277 - DNA, 146 bp, Artificial Sequence
  Bisulfite Padlock Probe
  misc_feature 93, 94, 95, 96, 97, 98: n = A,T,C or G
gactggaagagcactgttaaaaacgccacgtcgatacactaaccgttggaggctcatcgttcctattcaggcagatgttatcgaggtccgacnnnnnnctcaacctttctaaaacaaatttaataagatcggatacgcatgaggct

SEQ ID NO: 278 - DNA, 146 bp, Artificial Sequence
  Bisulfite Padlock Probe
  misc_feature 93, 94, 95, 96, 97, 98: n = A,T,C or G
gactggaagagcactgttaaaaacgccacgtcgatacgctaaccgttggaggctcatcgttcctattcaggcagatgttatcgaggtccgacnnnnnnctcaacctttctaaaacaaatttaataagatcggatacgcatgaggct

SEQ ID NO: 279 - DNA, 146 bp, Artificial Sequence
  Bisulfite Padlock Probe
  misc_feature 94, 95, 96, 97, 98, 99: n = A,T,C or G
gactggaagagcactgttaaaaacgccccaaccaaaaaaccaaacgttggaggctcatcgttcctattcaggcagatgttatcgaggtccgacnnnnnnaaaaccgcgaaaaccaaaactaatctagatcggatacgcatgaggct

SEQ ID NO: 280 - DNA, 146 bp, Artificial Sequence
  Bisulfite Padlock Probe
  misc_feature 94, 95, 96, 97, 98, 99: n = A,T,C or G
gactggaagagcactgttaaaaacgccccaaccgaaaaaccaaacgttggaggctcatcgttcctattcaggcagatgttatcgaggtccgacnnnnnnaaaaccgcgaaaaccgaaactaatctagatcggatacgcatgaggct

SEQ ID NO: 281 - DNA, 146 bp, Artificial Sequence
  Bisulfite Padlock Probe
  misc_feature 92, 93, 94, 95, 96, 97: n = A,T,C or G
gactggaagagcactgttaaaaacgcgaaatacacgcaataacgttggaggctcatcgttcctattcaggcagatgttatcgaggtccgacnnnnnnaaacgaattcattttattttaccaaaatcgatcggatacgcatgaggct

SEQ ID NO: 282 - DNA, 146 bp, Artificial Sequence
  Bisulfite Padlock Probe
  misc_feature 92, 93, 94, 95, 96, 97: n = A,T,C or G
gactggaagagcactgttaaaaacgcgaaatacacgcgataacgttggaggctcatcgttcctattcaggcagatgttatcgaggtccgacnnnnnnaaacgaattcgttttattttaccaaaatcgatcggatacgcatgaggct

SEQ ID NO: 283 - DNA, 146 bp, Artificial Sequence
  Bisulfite Padlock Probe
  misc_feature 95, 96, 97, 98, 99, 100: n = A,T,C or G
gactggaagagcactgttaaaaacgcgaaccccaaaaacccaaaaagttggaggctcatcgttcctattcaggcagatgttatcgaggtccgacnnnnnnaaacctacgcccgaaacaaaaactacgatcggatacgcatgaggct

SEQ ID NO: 284 - DNA, 146 bp, Artificial Sequence
  Bisulfite Padlock Probe
  misc_feature 95, 96, 97, 98, 99, 100: n = A,T,C or G
gactggaagagcactgttaaaaacgcgaaccccaaaaacccgaaaagttggaggctcatcgttcctattcaggcagatgttatcgaggtccgacnnnnnnaaacctacgcccgaaacgaaaactacgatcggatacgcatgaggct

SEQ ID NO: 285 - DNA, 146 bp, Artificial Sequence
  Bisulfite Padlock Probe
  misc_feature 92, 93, 94, 95, 96, 97: n = A,T,C or G
gactggaagagcactgttaaaaacgcgaccccctccctaaatagttggaggctcatcgttcctattcaggcagatgttatcgaggtccgacnnnnnnccctccttcccgataacacaacaacttaagatcggatacgcatgaggct

SEQ ID NO: 286 - DNA, 146 bp, Artificial Sequence
  Bisulfite Padlock Probe
  misc_feature 95, 96, 97, 98, 99, 100: n = A,T,C or G
gactggaagagcactgttaaaaacgcgaccgcaaacaatccaaaaagttggaggctcatcgttcctattcaggcagatgttatcgaggtccgacnnnnnnaaaaacgcaaatcgccgtcaaactacgatcggatacgcatgaggct

SEQ ID NO: 287 - DNA, 146 bp, Artificial Sequence
  Bisulfite Padlock Probe
  misc_feature 95, 96, 97, 98, 99, 100: n = A,T,C or G
gactggaagagcactgttaaaaacgcgaccgcaaacaatccgaaaagttggaggctcatcgttcctattcaggcagatgttatcgaggtccgacnnnnnnaaaaacgcaaatcgccgtcgaactacgatcggatacgcatgaggct

SEQ ID NO: 288 - DNA, 146 bp, Artificial Sequence
  Bisulfite Padlock Probe
  misc_feature 93, 94, 95, 96, 97, 98: n = A,T,C or G
gactggaagagcactgttaaaaacgcgtaaacgaccaacaacacgttggaggctcatcgttcctattcaggcagatgttatcgaggtccgacnnnnnnaatttaaaacaaaaacgccaccacacccgatcggatacgcatgaggct

SEQ ID NO: 289 - DNA, 146 bp, Artificial Sequence
  Bisulfite Padlock Probe
  misc_feature 93, 94, 95, 96, 97, 98: n = A,T,C or G
gactggaagagcactgttaaaaacgcgtaaacgaccaacaacgcgttggaggctcatcgttcctattcaggcagatgttatcgaggtccgacnnnnnnaatttaaaacaaaaacgccgccacacccgatcggatacgcatgaggct

SEQ ID NO: 290 - DNA, 146 bp, Artificial Sequence
  Bisulfite Padlock Probe
  misc_feature 94, 95, 96, 97, 98, 99: n = A,T,C or G
gactggaagagcactgttaaaaacgctaacctctacgaaaacaacgttggaggctcatcgttcctattcaggcagatgttatcgaggtccgacnnnnnnaaaaccgaaaccgaacgaaaccaaatcgatcggatacgcatgaggct

SEQ ID NO: 291 - DNA, 146 bp, Artificial Sequence
  Bisulfite Padlock Probe
  misc_feature 94, 95, 96, 97, 98, 99: n = A,T,C or G
gactggaagagcactgttaaaaacgctaacctctacgaaaacgacgttggaggctcatcgttcctattcaggcagatgttatcgaggtccgacnnnnnnaaaaccgaaaccgaacgaaaccgaatcgatcggatacgcatgaggct

SEQ ID NO: 292 - DNA, 146 bp, Artificial Sequence
  Bisulfite Padlock Probe
  misc_feature 92, 93, 94, 95, 96, 97: n = A,T,C or G
gactggaagagcactgttaaaaacgctatctaccaaccatctagttggaggctcatcgttcctattcaggcagatgttatcgaggtccgacnnnnnnaataaccactaacgcctaaaaactaaaaagatcggatacgcatgaggct

SEQ ID NO: 293 - DNA, 146 bp, Artificial Sequence
  Bisulfite Padlock Probe
  misc_feature 92, 93, 94, 95, 96, 97: n = A,T,C or G
gactggaagagcactgttaaaaacgctccaccaacaacaaaaagttggaggctcatcgttcctattcaggcagatgttatcgaggtccgacnnnnnnaatataatacgattctactcgacgcactcgatcggatacgcatgaggct

SEQ ID NO: 294 - DNA, 146 bp, Artificial Sequence
  Bisulfite Padlock Probe
  misc_feature 92, 93, 94, 95, 96, 97: n = A,T,C or G
gactggaagagcactgttaaaaacgctccgccaacaacaaaaagttggaggctcatcgttcctattcaggcagatgttatcgaggtccgacnnnnnnaatataatacgattctactcgacgcgctcgatcggatacgcatgaggct

SEQ ID NO: 295 - DNA, 146 bp, Artificial Sequence
  Bisulfite Padlock Probe
  misc_feature 92, 93, 94, 95, 96, 97: n = A,T,C or G
gactggaagagcactgttaaaaacgtaaaaacaattccccaccgttggaggctcatcgttcctattcaggcagatgttatcgaggtccgacnnnnnnaaaccattcgcaacccacgaacttaaaaagatcggatacgcatgaggct

SEQ ID NO: 296 - DNA, 146 bp, Artificial Sequence
  Bisulfite Padlock Probe
  misc_feature 95, 96, 97, 98, 99, 100: n = A,T,C or G
gactggaagagcactgttaaaaacgtaataaaaacttaccaattccgttggaggctcatcgttcctattcaggcagatgttatcgaggtccgacnnnnnncatcttcgcgcgcaaaaacaaaaaccgatcggatacgcatgaggct

SEQ ID NO: 297 - DNA, 146 bp, Artificial Sequence
  Bisulfite Padlock Probe
  misc_feature 95, 96, 97, 98, 99, 100: n = A,T,C or G
gactggaagagcactgttaaaaacgtaataaaaacttaccgattccgttggaggctcatcgttcctattcaggcagatgttatcgaggtccgacnnnnnncatcttcgcgcgcaaaaacgaaaaccgatcggatacgcatgaggct

SEQ ID NO: 298 - DNA, 146 bp, Artificial Sequence
  Bisulfite Padlock Probe
  misc_feature 92, 93, 94, 95, 96, 97: n = A,T,C or G
gactggaagagcactgttaaaaacgtaatacccaaaataccacgttggaggctcatcgttcctattcaggcagatgttatcgaggtccgacnnnnnnactcaaccctttcccgtattcacaaaaaagatcggatacgcatgaggct

SEQ ID NO: 299 - DNA, 146 bp, Artificial Sequence
  Bisulfite Padlock Probe
  misc_feature 92, 93, 94, 95, 96, 97: n = A,T,C or G
gactggaagagcactgttaaaaacgtaatacccaaaataccgcgttggaggctcatcgttcctattcaggcagatgttatcgaggtccgacnnnnnnactcaaccctttcccgtattcacgaaaaagatcggatacgcatgaggct

SEQ ID NO: 300 - DNA, 146 bp, Artificial Sequence
  Bisulfite Padlock Probe
  misc_feature 92, 93, 94, 95, 96, 97: n = A,T,C or G
gactggaagagcactgttaaaaacgtctccgcaaaactaacccgttggaggctcatcgttcctattcaggcagatgttatcgaggtccgacnnnnnnaaacccactaaaccttaaaaattaaactagatcggatacgcatgaggct

SEQ ID NO: 301 - DNA, 146 bp, Artificial Sequence
  Bisulfite Padlock Probe
  misc_feature 92, 93, 94, 95, 96, 97: n = A,T,C or G
gactggaagagcactgttaaaaacgtctccgcgaaactaacccgttggaggctcatcgttcctattcaggcagatgttatcgaggtccgacnnnnnnaaacccgctaaaccttaaaaattaaactagatcggatacgcatgaggct

SEQ ID NO: 302 - DNA, 146 bp, Artificial Sequence
  Bisulfite Padlock Probe
  misc_feature 92, 93, 94, 95, 96, 97: n = A,T,C or G
gactggaagagcactgttaaaaacgttaaactattataaactcgttggaggctcatcgttcctattcaggcagatgttatcgaggtccgacnnnnnncccaattcataaccgaaaaccaacgcaacgatcggatacgcatgaggct

SEQ ID NO: 303 - DNA, 146 bp, Artificial Sequence
  Bisulfite Padlock Probe
  misc_feature 92, 93, 94, 95, 96, 97: n = A,T,C or G
gactggaagagcactgttaaaaactaaaaaccacccccgcccagttggaggctcatcgttcctattcaggcagatgttatcgaggtccgacnnnnnnaactaaaactaaacgcaaaatacaactatgatcggatacgcatgaggct

SEQ ID NO: 304 - DNA, 146 bp, Artificial Sequence
  Bisulfite Padlock Probe
  misc_feature 92, 93, 94, 95, 96, 97: n = A,T,C or G
gactggaagagcactgttaaaaactaaaaaccacccccgcccggttggaggctcatcgttcctattcaggcagatgttatcgaggtccgacnnnnnnaactaaaactaaacgcgaaatacaactatgatcggatacgcatgaggct

SEQ ID NO: 305 - DNA, 146 bp, Artificial Sequence
  Bisulfite Padlock Probe
  misc_feature 93, 94, 95, 96, 97, 98: n = A,T,C or G
gactggaagagcactgttaaaaactaaaaacccgcacaacaaccgttggaggctcatcgttcctattcaggcagatgttatcgaggtccgacnnnnnntaacttacgacaacgacgaaaactcacagatcggatacgcatgaggct

SEQ ID NO: 306 - DNA, 146 bp, Artificial Sequence
  Bisulfite Padlock Probe
  misc_feature 93, 94, 95, 96, 97, 98: n = A,T,C or G
gactggaagagcactgttaaaaactaaaaacccgcgcaacaaccgttggaggctcatcgttcctattcaggcagatgttatcgaggtccgacnnnnnntaacttacgacaacgacgaaaactcgcagatcggatacgcatgaggct

SEQ ID NO: 307 - DNA, 146 bp, Artificial Sequence
  Bisulfite Padlock Probe
  misc_feature 96, 97, 98, 99, 100, 101: n = A,T,C or G
gactggaagagcactgttaaaaactaaaaaccctacccgttcaccaagttggaggctcatcgttcctattcaggcagatgttatcgaggtccgacnnnnnnccctctccaaataaccacaataaacgatcggatacgcatgaggct

SEQ ID NO: 308 - DNA, 146 bp, Artificial Sequence
  Bisulfite Padlock Probe
  misc_feature 96, 97, 98, 99, 100, 101: n = A,T,C or G
gactggaagagcactgttaaaaactaaaaaccctacccgttcgccaagttggaggctcatcgttcctattcaggcagatgttatcgaggtccgacnnnnnnccctctccaaataaccacaataaacgatcggatacgcatgaggct

SEQ ID NO: 309 - DNA, 146 bp, Artificial Sequence
  Bisulfite Padlock Probe
  misc_feature 96, 97, 98, 99, 100, 101: n = A,T,C or G
gactggaagagcactgttaaaaactaaaacctcctctaccaactcccgttggaggctcatcgttcctattcaggcagatgttatcgaggtccgacnnnnnnccctacaactctcacctacctctccgatcggatacgcatgaggct

SEQ ID NO: 310 - DNA, 146 bp, Artificial Sequence
  Bisulfite Padlock Probe
  misc_feature 96, 97, 98, 99, 100, 101: n = A,T,C or G
gactggaagagcactgttaaaaactaaaacctcctctaccaactcccgttggaggctcatcgttcctattcaggcagatgttatcgaggtccgacnnnnnnccctacaactctcgcctacctctccgatcggatacgcatgaggct

SEQ ID NO: 311 - DNA, 146 bp, Artificial Sequence
  Bisulfite Padlock Probe
  misc_feature 92, 93, 94, 95, 96, 97: n = A,T,C or G
gactggaagagcactgttaaaaactaaaataacaaaataaaaagttggaggctcatcgttcctattcaggcagatgttatcgaggtccgacnnnnnnaatcctaaaaccttcgacaaaatataaaagatcggatacgcatgaggct

SEQ ID NO: 312 - DNA, 146 bp, Artificial Sequence
  Bisulfite Padlock Probe
  misc_feature 92, 93, 94, 95, 96, 97: n = A,T,C or G
gactggaagagcactgttaaaaactaaaataacgaaataaaaagttggaggctcatcgttcctattcaggcagatgttatcgaggtccgacnnnnnnaatcctaaaaccttcgacgaaatataaaagatcggatacgcatgaggct

SEQ ID NO: 313 - DNA, 146 bp, Artificial Sequence
  Bisulfite Padlock Probe
  misc_feature 94, 95, 96, 97, 98, 99: n = A,T,C or G
gactggaagagcactgttaaaaactaaaccccaaaaactacaaaagttggaggctcatcgttcctattcaggcagatgttatcgaggtccgacnnnnnncttaacacctcccctactcctaccctcgatcggatacgcatgaggct

SEQ ID NO: 314 - DNA, 146 bp, Artificial Sequence
  Bisulfite Padlock Probe
  misc_feature 92, 93, 94, 95, 96, 97: n = A,T,C or G
gactggaagagcactgttaaaaactaaaccccactaaatccatgttggaggctcatcgttcctattcaggcagatgttatcgaggtccgacnnnnnnacaaataaatacccaaatactattctatagatcggatacgcatgaggct

SEQ ID NO: 315 - DNA, 146 bp, Artificial Sequence
  Bisulfite Padlock Probe
  misc_feature 94, 95, 96, 97, 98, 99: n = A,T,C or G
gactggaagagcactgttaaaaactaaaccccgaaaactacaaaagttggaggctcatcgttcctattcaggcagatgttatcgaggtccgacnnnnnncttaacacctcccctactcctaccctcgatcggatacgcatgaggct

SEQ ID NO: 316 - DNA, 146 bp, Artificial Sequence
  Bisulfite Padlock Probe
  misc_feature 92, 93, 94, 95, 96, 97: n = A,T,C or G
gactggaagagcactgttaaaaactaaaccgacccctccgtcagttggaggctcatcgttcctattcaggcagatgttatcgaggtccgacnnnnnnaactacaaataaccatatccaaaataccagatcggatacgcatgaggct

SEQ ID NO: 317 - DNA, 146 bp, Artificial Sequence
  Bisulfite Padlock Probe
  misc_feature 92, 93, 94, 95, 96, 97: n = A,T,C or G
gactggaagagcactgttaaaaactaaaccgacccctccgtcggttggaggctcatcgttcctattcaggcagatgttatcgaggtccgacnnnnnnaactacaaataaccgtatccaaaataccagatcggatacgcatgaggct

SEQ ID NO: 318 - DNA, 146 bp, Artificial Sequence
  Bisulfite Padlock Probe
  misc_feature 95, 96, 97, 98, 99, 100: n = A,T,C or G
gactggaagagcactgttaaaaactaaacctaaaacaccctctctagttggaggctcatcgttcctattcaggcagatgttatcgaggtccgacnnnnnncgaaaacctccgcctaaaacaaacccgatcggatacgcatgaggct

SEQ ID NO: 319 - DNA, 146 bp, Artificial Sequence
  Bisulfite Padlock Probe
  misc_feature 95, 96, 97, 98, 99, 100: n = A,T,C or G
gactggaagagcactgttaaaaactaaacctaaaacgccctctctagttggaggctcatcgttcctattcaggcagatgttatcgaggtccgacnnnnnncgaaaacctccgcctaaaacgaacccgatcggatacgcatgaggct

SEQ ID NO: 320 - DNA, 146 bp, Artificial Sequence
  Bisulfite Padlock Probe
  misc_feature 95, 96, 97, 98, 99, 100: n = A,T,C or G
gactggaagagcactgttaaaaactaacaactaaaaataccaaaaagttggaggctcatcgttcctattcaggcagatgttatcgaggtccgacnnnnnnaaaccgaaaccgaaccaaccaaaaaagatcggatacgcatgaggct

SEQ ID NO: 321 - DNA, 146 bp, Artificial Sequence
  Bisulfite Padlock Probe
  misc_feature 96, 97, 98, 99, 100, 101: n = A,T,C or G
gactggaagagcactgttaaaaactaacacaaattctacctcaaatagttggaggctcatcgttcctattcaggcagatgttatcgaggtccgacnnnnnnaaaaacaaaacccaccaaataaaaagatcggatacgcatgaggct

SEQ ID NO: 322 - DNA, 146 bp, Artificial Sequence
  Bisulfite Padlock Probe
  misc_feature 96, 97, 98, 99, 100, 101: n = A,T,C or G
gactggaagagcactgttaaaaactaacacaaattctacctcaaatagttggaggctcatcgttcctattcaggcagatgttatcgaggtccgacnnnnnnaaaaacaaaacccgccaaataaaaagatcggatacgcatgaggct

SEQ ID NO: 323 - DNA, 146 bp, Artificial Sequence
  Bisulfite Padlock Probe
  misc_feature 95, 96, 97, 98, 99, 100: n = A,T,C or G
gactggaagagcactgttaaaaactaacgactaaaaataccaaaaagttggaggctcatcgttcctattcaggcagatgttatcgaggtccgacnnnnnnaaaccgaaaccgaaccaaccgaaaaagatcggatacgcatgaggct

SEQ ID NO: 324 - DNA, 146 bp, Artificial Sequence
  Bisulfite Padlock Probe
  misc_feature 92, 93, 94, 95, 96, 97: n = A,T,C or G
gactggaagagcactgttaaaaactaacgcgaaccgacaataagttggaggctcatcgttcctattcaggcagatgttatcgaggtccgacnnnnnnccaaaactaaaataacaacaaaacaaaaagatcggatacgcatgaggct

SEQ ID NO: 325 - DNA, 146 bp, Artificial Sequence
  Bisulfite Padlock Probe
  misc_feature 92, 93, 94, 95, 96, 97: n = A,T,C or G
gactggaagagcactgttaaaaactaacgcgaaccgacgataagttggaggctcatcgttcctattcaggcagatgttatcgaggtccgacnnnnnnccaaaactaaaataacgacaaaacaaaaagatcggatacgcatgaggct

SEQ ID NO: 326 - DNA, 146 bp, Artificial Sequence
  Bisulfite Padlock Probe
  misc_feature 96, 97, 98, 99, 100, 101: n = A,T,C or G
gactggaagagcactgttaaaaactacaaaaacaaaaatatacacaagttggaggctcatcgttcctattcaggcagatgttatcgaggtccgacnnnnnncaaaataaaaataactcttccaaccgatcggatacgcatgaggct

SEQ ID NO: 327 - DNA, 146 bp, Artificial Sequence; identical to SEQ ID NO: 326
  Bisulfite Padlock Probe
  misc_feature 96, 97, 98, 99, 100, 101: n = A,T,C or G

SEQ ID NO: 328 - DNA, 146 bp, Artificial Sequence
  Bisulfite Padlock Probe
  misc_feature 94, 95, 96, 97, 98, 99: n = A,T,C or G
gactggaagagcactgttaaaaactacaaatcgacgaacgcaaacgttggaggctcatcgttcctattcaggcagatgttatcgaggtccgacnnnnnntacgaaccacaaaaccctactaaaaccgatcggatacgcatgaggct

SEQ ID NO: 329 - DNA, 146 bp, Artificial Sequence
  Bisulfite Padlock Probe
  misc_feature 94, 95, 96, 97, 98, 99: n = A,T,C or G
gactggaagagcactgttaaaaactacaaatcgacgaacgcgaacgttggaggctcatcgttcctattcaggcagatgttatcgaggtccgacnnnnnntacgaaccacgaaaccctactaaaaccgatcggatacgcatgaggct

SEQ ID NO: 330 - DNA, 146 bp, Artificial Sequence
  Bisulfite Padlock Probe
  misc_feature 92, 93, 94, 95, 96, 97: n = A,T,C or G
gactggaagagcactgttaaaaactacacaaccaactcaaaaagttggaggctcatcgttcctattcaggcagatgttatcgaggtccgacnnnnnnataacccgaaaattaaccacgaccaaatcgatcggatacgcatgaggct

SEQ ID NO: 331 - DNA, 146 bp, Artificial Sequence
  Bisulfite Padlock Probe
  misc_feature 92, 93, 94, 95, 96, 97: n = A,T,C or G
gactggaagagcactgttaaaaactacacgaccaactcaaaaagttggaggctcatcgttcctattcaggcagatgttatcgaggtccgacnnnnnnataacccgaaaattaaccacgaccgaatcgatcggatacgcatgaggct

SEQ ID NO: 332 - DNA, 146 bp, Artificial Sequence
  Bisulfite Padlock Probe
  misc_feature 92, 93, 94, 95, 96, 97: n = A,T,C or G
gactggaagagcactgttaaaaactacatcttacataactaacgttggaggctcatcgttcctattcaggcagatgttatcgaggtccgacnnnnnncaaaacctttcccgatttcatcatcaaccgatcggatacgcatgaggct

SEQ ID NO: 333 - DNA, 146 bp, Artificial Sequence
  Bisulfite Padlock Probe
  misc_feature 92, 93, 94, 95, 96, 97: n = A,T,C or G
gactggaagagcactgttaaaaactacatcttacgtaactaacgttggaggctcatcgttcctattcaggcagatgttatcgaggtccgacnnnnnncaaaacctttcccgatttcgtcatcaaccgatcggatacgcatgaggct

SEQ ID NO: 334 - DNA, 146 bp, Artificial Sequence
  Bisulfite Padlock Probe
  misc_feature 92, 93, 94, 95, 96, 97: n = A,T,C or G
gactggaagagcactgttaaaaactaccccaacaatactaaacgttggaggctcatcgttcctattcaggcagatgttatcgaggtccgacnnnnnnaaaaacaaacactaaattttatacacaatgatcggatacgcatgaggct

SEQ ID NO: 335 - DNA, 146 bp, Artificial Sequence
  Bisulfite Padlock Probe
  misc_feature 92, 93, 94, 95, 96, 97: n = A,T,C or G
gactggaagagcactgttaaaaactaccccgccgacgacaaaagttggaggctcatcgttcctattcaggcagatgttatcgaggtccgacnnnnnnaacatcctttaaaaataactttacttaaagatcggatacgcatgaggct

SEQ ID NO: 336 - DNA, 146 bp, Artificial Sequence
  Bisulfite Padlock Probe
  misc_feature 92, 93, 94, 95, 96, 97: n = A,T,C or G
gactggaagagcactgttaaaaactaccccgccgacgacgaaagttggaggctcatcgttcctattcaggcagatgttatcgaggtccgacnnnnnnaacatcctttaaaaataactttacttaaagatcggatacgcatgaggct

SEQ ID NO: 337 - DNA, 146 bp, Artificial Sequence
  Bisulfite Padlock Probe
  misc_feature 92, 93, 94, 95, 96, 97: n = A,T,C or G
gactggaagagcactgttaaaaactacccgaacccccgaacaagttggaggctcatcgttcctattcaggcagatgttatcgaggtccgacnnnnnnctacgccctaattacaccataaatccttcgatcggatacgcatgaggct

SEQ ID NO: 338 - DNA, 146 bp, Artificial Sequence
  Bisulfite Padlock Probe
  misc_feature 92, 93, 94, 95, 96, 97: n = A,T,C or G
gactggaagagcactgttaaaaactacccgaacccccgaacgagttggaggctcatcgttcctattcaggcagatgttatcgaggtccgacnnnnnnctacgccctaattacgccataaatccttcgatcggatacgcatgaggct

SEQ ID NO: 339 - DNA, 146 bp, Artificial Sequence
  Bisulfite Padlock Probe
  misc_feature 94, 95, 96, 97, 98, 99: n = A,T,C or G
gactggaagagcactgttaaaaactacgaaccaaaaacctaaaacgttggaggctcatcgttcctattcaggcagatgttatcgaggtccgacnnnnnnaaacctaacaacgacaaataaaacatcgatcggatacgcatgaggct

SEQ ID NO: 340 - DNA, 146 bp, Artificial Sequence
  Bisulfite Padlock Probe
  misc_feature 94, 95, 96, 97, 98, 99: n = A,T,C or G
gactggaagagcactgttaaaaactacgaaccgaaaacctaaaacgttggaggctcatcgttcctattcaggcagatgttatcgaggtccgacnnnnnnaaacctaacaacgacgaataaaacatcgatcggatacgcatgaggct

SEQ ID NO: 341 - DNA, 146 bp, Artificial Sequence
  Bisulfite Padlock Probe
  misc_feature 93, 94, 95, 96, 97, 98: n = A,T,C or G
gactggaagagcactgttaaaaactacgcgaccgcctcttcaaagttggaggctcatcgttcctattcaggcagatgttatcgaggtccgacnnnnnncgcgactaccgaacaataaaacaaccttgatcggatacgcatgaggct

SEQ ID NO: 342 - DNA, 146 bp, Artificial Sequence
  Bisulfite Padlock Probe
  misc_feature 93, 94, 95, 96, 97, 98: n = A,T,C or G
gactggaagagcactgttaaaaactacgcgaccgcctcttcgaagttggaggctcatcgttcctattcaggcagatgttatcgaggtccgacnnnnnncgcgactaccgaacgataaaacaaccttgatcggatacgcatgaggct

SEQ ID NO: 343 - DNA, 146 bp, Artificial Sequence
  Bisulfite Padlock Probe
  misc_feature 95, 96, 97, 98, 99, 100: n = A,T,C or G
gactggaagagcactgttaaaaactacgcgacgacgtaacaaaaaagttggaggctcatcgttcctattcaggcagatgttatcgaggtccgacnnnnnntaaacgcgcgcgcgtataacaaaaaagatcggatacgcatgaggct

SEQ ID NO: 344 - DNA, 146 bp, Artificial Sequence
  Bisulfite Padlock Probe
  misc_feature 95, 96, 97, 98, 99, 100: n = A,T,C or G
gactggaagagcactgttaaaaactacgcgacgacgtaacgaaaaagttggaggctcatcgttcctattcaggcagatgttatcgaggtccgacnnnnnntaaacgcgcgcgcgtataacgaaaaagatcggatacgcatgaggct

SEQ ID NO: 345 - DNA, 146 bp, Artificial Sequence
  Bisulfite Padlock Probe
  misc_feature 96, 97, 98, 99, 100, 101: n = A,T,C or G
gactggaagagcactgttaaaaactactactcctttaaaacaaaaacgttggaggctcatcgttcctattcaggcagatgttatcgaggtccgacnnnnnnccctccgcgtactcctaacactctagatcggatacgcatgaggct

SEQ ID NO: 346 - DNA, 146 bp, Artificial Sequence
  Bisulfite Padlock Probe
  misc_feature 96, 97, 98, 99, 100, 101: n = A,T,C or G
gactggaagagcactgttaaaaactactactcctttaaaacgaaaacgttggaggctcatcgttcctattcaggcagatgttatcgaggtccgacnnnnnnccctccgcgtactcctaacgctctagatcggatacgcatgaggct

SEQ ID NO: 347 - DNA, 146 bp, Artificial Sequence
  Bisulfite Padlock Probe
  misc_feature 96, 97, 98, 99, 100, 101: n = A,T,C or G
gactggaagagcactgttaaaaactatactatacgctaactaccaccgttggaggctcatcgttcctattcaggcagatgttatcgaggtccgacnnnnnnactaatcacctaaccatactactccgatcggatacgcatgaggct

SEQ ID NO: 348 - DNA, 146 bp, Artificial Sequence
  Bisulfite Padlock Probe
  misc_feature 96, 97, 98, 99, 100, 101: n = A,T,C or G
gactggaagagcactgttaaaaactatactatacgctaactaccgccgttggaggctcatcgttcctattcaggcagatgttatcgaggtccgacnnnnnnactaatcacctaaccgtactactccgatcggatacgcatgaggct

SEQ ID NO: 349 - DNA, 146 bp, Artificial Sequence
  Bisulfite Padlock Probe
  misc_feature 94, 95, 96, 97, 98, 99: n = A,T,C or G
gactggaagagcactgttaaaaactcaaaatatatcttatctttcgttggaggctcatcgttcctattcaggcagatgttatcgaggtccgacnnnnnnataacacaaataaaaaccctcctcaacgatcggatacgcatgaggct

SEQ ID NO: 350 - DNA, 146 bp, Artificial Sequence
  Bisulfite Padlock Probe
  misc_feature 92, 93, 94, 95, 96, 97: n = A,T,C or G
gactggaagagcactgttaaaaactcaaacgacccttaacaaagttggaggctcatcgttcctattcaggcagatgttatcgaggtccgacnnnnnnaacatttacaaccttcaccaaaaccccaagatcggatacgcatgaggct

SEQ ID NO: 351 - DNA, 146 bp, Artificial Sequence
  Bisulfite Padlock Probe
  misc_feature 92, 93, 94, 95, 96, 97: n = A,T,C or G
gactggaagagcactgttaaaaactcaaacgacccttaacgaagttggaggctcatcgttcctattcaggcagatgttatcgaggtccgacnnnnnnaacatttacaaccttcgccaaaaccccaagatcggatacgcatgaggct

SEQ ID NO: 352 - DNA, 146 bp, Artificial Sequence
  Bisulfite Padlock Probe
  misc_feature 93, 94, 95, 96, 97, 98: n = A,T,C or G
gactggaagagcactgttaaaaactcaatctcaataaccaaaaagttggaggctcatcgttcctattcaggcagatgttatcgaggtccgacnnnnnncccgctactaactaaccatccacatctagatcggatacgcatgaggct

SEQ ID NO: 353 - DNA, 146 bp, Artificial Sequence
  Bisulfite Padlock Probe
  misc_feature 92, 93, 94, 95, 96, 97: n = A,T,C or G
gactggaagagcactgttaaaaactcacaaaacctactaaaaagttggaggctcatcgttcctattcaggcagatgttatcgaggtccgacnnnnnncattaacatccttctaacctaaataataagatcggatacgcatgaggct

SEQ ID NO: 354 - DNA, 146 bp, Artificial Sequence
  Bisulfite Padlock Probe
  misc_feature 92, 93, 94, 95, 96, 97: n = A,T,C or G
gactggaagagcactgttaaaaactcacgaaacctactaaaaagttggaggctcatcgttcctattcaggcagatgttatcgaggtccgacnnnnnncattaacatccttctaacctaaataataagatcggatacgcatgaggct

SEQ ID NO: 355 - DNA, 146 bp, Artificial Sequence
  Bisulfite Padlock Probe
  misc_feature 95, 96, 97, 98, 99, 100: n = A,T,C or G
gactggaagagcactgttaaaaactcccaaaaaacaatcaaaatacgttggaggctcatcgttcctattcaggcagatgttatcgaggtccgacnnnnnnaaaaacgaaaacccgaaacgcgcatagatcggatacgcatgaggct

SEQ ID NO: 356 - DNA, 146 bp, Artificial Sequence
  Bisulfite Padlock Probe
  misc_feature 92, 93, 94, 95, 96, 97: n = A,T,C or G
gactggaagagcactgttaaaaactcccaaccaccgacaccaagttggaggctcatcgttcctattcaggcagatgttatcgaggtccgacnnnnnncgaaccgtaaccgctactaaacaacaaaagatcggatacgcatgaggct

SEQ ID NO: 357 - DNA, 146 bp, Artificial Sequence
  Bisulfite Padlock Probe
  misc_feature 92, 93, 94, 95, 96, 97: n = A,T,C or G
gactggaagagcactgttaaaaactcccaaccaccgacaccgagttggaggctcatcgttcctattcaggcagatgttatcgaggtccgacnnnnnncgaaccgtaaccgctactaaacgacaaaagatcggatacgcatgaggct

SEQ ID NO: 358 - DNA, 146 bp, Artificial Sequence
  Bisulfite Padlock Probe
  misc_feature 92, 93, 94, 95, 96, 97: n = A,T,C or G
gactggaagagcactgttaaaaactccccctaaaaacaaaatcgttggaggctcatcgttcctattcaggcagatgttatcgaggtccgacnnnnnnaaactactacgcaacgactcgcacaaaaagatcggatacgcatgaggct

SEQ ID NO: 359 - DNA, 146 bp, Artificial Sequence
  Bisulfite Padlock Probe
  misc_feature 92, 93, 94, 95, 96, 97: n = A,T,C or G
gactggaagagcactgttaaaaactccccctaaaaacgaaatcgttggaggctcatcgttcctattcaggcagatgttatcgaggtccgacnnnnnnaaactactacgcaacgactcgcacgaaaagatcggatacgcatgaggct

SEQ ID NO: 360 - DNA, 146 bp, Artificial Sequence
  Bisulfite Padlock Probe
  misc_feature 95, 96, 97, 98, 99, 100: n = A,T,C or G
gactggaagagcactgttaaaaactcccgaaaaacaatcaaaatacgttggaggctcatcgttcctattcaggcagatgttatcgaggtccgacnnnnnnaaaaacgaaaacccgaaacgcgcgtagatcggatacgcatgaggct

SEQ ID NO: 361 - DNA, 146 bp, Artificial Sequence
  Bisulfite Padlock Probe
  misc_feature 96, 97, 98, 99, 100, 101: n = A,T,C or G
gactggaagagcactgttaaaaactccgaaacaaccgccaaaataatgttggaggctcatcgttcctattcaggcagatgttatcgaggtccgacnnnnnnataaactaaaccgtaaaacatctccgatcggatacgcatgaggct

SEQ ID NO: 362 - DNA, 146 bp, Artificial Sequence
  Bisulfite Padlock Probe
  misc_feature 96, 97, 98, 99, 100, 101: n = A,T,C or G
gactggaagagcactgttaaaaactccgaaacaaccgccgaaataatgttggaggctcatcgttcctattcaggcagatgttatcgaggtccgacnnnnnnataaactaaaccgtaaaacgtctccgatcggatacgcatgaggct

SEQ ID NO: 363 - DNA, 146 bp, Artificial Sequence
  Bisulfite Padlock Probe
  misc_feature 93, 94, 95, 96, 97, 98: n = A,T,C or G
gactggaagagcactgttaaaaactccgaactaaaacaaaaaacgttggaggctcatcgttcctattcaggcagatgttatcgaggtccgacnnnnnnaacccaaaataatttccttcctaaaattgatcggatacgcatgaggct

SEQ ID NO: 364 - DNA, 146 bp, Artificial Sequence
  Bisulfite Padlock Probe
  misc_feature 93, 94, 95, 96, 97, 98: n = A,T,C or G
gactggaagagcactgttaaaaactccgaactaaaacgaaaaacgttggaggctcatcgttcctattcaggcagatgttatcgaggtccgacnnnnnnaacccaaaataatttccttcctaaaattgatcggatacgcatgaggct

SEQ ID NO: 365 - DNA, 146 bp, Artificial Sequence
  Bisulfite Padlock Probe
  misc_feature 93, 94, 95, 96, 97, 98: n = A,T,C or G
gactggaagagcactgttaaaaactccgcgaaacgatcacaaccgttggaggctcatcgttcctattcaggcagatgttatcgaggtccgacnnnnnnctaatctcaacgtacttaaaaacataccgatcggatacgcatgaggct

SEQ ID NO: 366 - DNA, 146 bp, Artificial Sequence
  Bisulfite Padlock Probe
  misc_feature 93, 94, 95, 96, 97, 98: n = A,T,C or G
gactggaagagcactgttaaaaactccgcgaaacgatcgcaaccgttggaggctcatcgttcctattcaggcagatgttatcgaggtccgacnnnnnnctaatctcaacgtacttaaaaacgtaccgatcggatacgcatgaggct

SEQ ID NO: 367 - DNA, 146 bp, Artificial Sequence
  Bisulfite Padlock Probe
  misc_feature 96, 97, 98, 99, 100, 101: n = A,T,C or G
gactggaagagcactgttaaaaactcctaaaaacccaaaaactcaaagttggaggctcatcgttcctattcaggcagatgttatcgaggtccgacnnnnnnaaaaaccaaaattataacccaaaaagatcggatacgcatgaggct

SEQ ID NO: 368 - DNA, 146 bp, Artificial Sequence
  Bisulfite Padlock Probe
  misc_feature 96, 97, 98, 99, 100, 101: n = A,T,C or G
gactggaagagcactgttaaaaactcctaaaaacccgaaaactcaaagttggaggctcatcgttcctattcaggcagatgttatcgaggtccgacnnnnnnaaaaaccaaaattataacccaaaaagatcggatacgcatgaggct

SEQ ID NO: 369 - DNA, 146 bp, Artificial Sequence
  Bisulfite Padlock Probe
  misc_feature 95, 96, 97, 98, 99, 100: n = A,T,C or G
gactggaagagcactgttaaaaactcctaacctaacccaacttatcgttggaggctcatcgttcctattcaggcagatgttatcgaggtccgacnnnnnncctctacacacttcaatccttctcccgatcggatacgcatgaggct

SEQ ID NO: 370 - DNA, 146 bp, Artificial Sequence
  Bisulfite Padlock Probe
  misc_feature 95, 96, 97, 98, 99, 100: n = A,T,C or G
gactggaagagcactgttaaaaactcctaacctaacccgacttatcgttggaggctcatcgttcctattcaggcagatgttatcgaggtccgacnnnnnncctctacacgcttcaatccttctcccgatcggatacgcatgaggct

SEQ ID NO: 371 - DNA, 146 bp, Artificial Sequence
  Bisulfite Padlock Probe
  misc_feature 95, 96, 97, 98, 99, 100: n = A,T,C or G
gactggaagagcactgttaaaaactcctaactctcctcccaaatccgttggaggctcatcgttcctattcaggcagatgttatcgaggtccgacnnnnnnaaaccaaccaaaactattcccaaaaagatcggatacgcatgaggct

SEQ ID NO: 372 - DNA, 146 bp, Artificial Sequence
  Bisulfite Padlock Probe
  misc_feature 95, 96, 97, 98, 99, 100: n = A,T,C or G
gactggaagagcactgttaaaaactcctaactctcctcccgaatccgttggaggctcatcgttcctattcaggcagatgttatcgaggtccgacnnnnnnaaaccaaccgaaactattcccaaaaagatcggatacgcatgaggct

SEQ ID NO: 373 - DNA, 146 bp, Artificial Sequence
  Bisulfite Padlock Probe
  misc_feature 96, 97, 98, 99, 100, 101: n = A,T,C or G
gactggaagagcactgttaaaaactcctccttctactccctcacctcgttggaggctcatcgttcctattcaggcagatgttatcgaggtccgacnnnnnnaaactaacctaactaacccaacaccgatcggatacgcatgaggct

SEQ ID NO: 374 - DNA, 146 bp, Artificial Sequence
  Bisulfite Padlock Probe
  misc_feature 96, 97, 98, 99, 100, 101: n = A,T,C or G
gactggaagagcactgttaaaaactcctccttctactccctcgcctcgttggaggctcatcgttcctattcaggcagatgttatcgaggtccgacnnnnnnaaactaacctaactaacccaacgccgatcggatacgcatgaggct

SEQ ID NO: 375 - DNA, 146 bp, Artificial Sequence
  Bisulfite Padlock Probe
  misc_feature 95, 96, 97, 98, 99, 100: n = A,T,C or G
gactggaagagcactgttaaaaactcgaaaaacaaaaaccacttccgttggaggctcatcgttcctattcaggcagatgttatcgaggtccgacnnnnnnatatacacaaccacataaccaacacagatcggatacgcatgaggct

SEQ ID NO: 376 - DNA, 146 bp, Artificial Sequence
  Bisulfite Padlock Probe
  misc_feature 95, 96, 97, 98, 99, 100: n = A,T,C or G
gactggaagagcactgttaaaaactcgaaaaacaaaaaccgcttccgttggaggctcatcgttcctattcaggcagatgttatcgaggtccgacnnnnnnatatacacaaccacataaccaacacagatcggatacgcatgaggct

SEQ ID NO: 377 - DNA, 146 bp, Artificial Sequence
  Bisulfite Padlock Probe
  misc_feature 94, 95, 96, 97, 98, 99: n = A,T,C or G
gactggaagagcactgttaaaaactcgaaatatatcttatctttcgttggaggctcatcgttcctattcaggcagatgttatcgaggtccgacnnnnnnataacgcaaataaaaaccctcctcaacgatcggatacgcatgaggct

SEQ ID NO: 378 - DNA, 146 bp, Artificial Sequence
  Bisulfite Padlock Probe
  misc_feature 93, 94, 95, 96, 97, 98: n = A,T,C or G
gactggaagagcactgttaaaaactcgatctcaataaccaaaaagttggaggctcatcgttcctattcaggcagatgttatcgaggtccgacnnnnnncccgctactaactaaccatccgcatctagatcggatacgcatgaggct

SEQ ID NO: 379 - DNA, 146 bp, Artificial Sequence
  Bisulfite Padlock Probe
  misc_feature 92, 93, 94, 95, 96, 97: n = A,T,C or G
gactggaagagcactgttaaaaactcgtcccaaaacccgcacagttggaggctcatcgttcctattcaggcagatgttatcgaggtccgacnnnnnnaccgacatcaatatcaactttccctaattgatcggatacgcatgaggct

SEQ ID NO: 380 - DNA, 146 bp, Artificial Sequence
  Bisulfite Padlock Probe
  misc_feature 92, 93, 94, 95, 96, 97: n = A,T,C or G
gactggaagagcactgttaaaaactcgtcccaaaacccgcacggttggaggctcatcgttcctattcaggcagatgttatcgaggtccgacnnnnnnaccgacatcgatatcaactttccctaattgatcggatacgcatgaggct

SEQ ID NO: 381 - DNA, 146 bp, Artificial Sequence
  Bisulfite Padlock Probe
  misc_feature 92, 93, 94, 95, 96, 97: n = A,T,C or G
gactggaagagcactgttaaaaactctacccaataactaaaaagttggaggctcatcgttcctattcaggcagatgttatcgaggtccgacnnnnnnacaaactaaaccttcctataatccctattgatcggatacgcatgaggct

SEQ ID NO: 382 - DNA, 146 bp, Artificial Sequence
  Bisulfite Padlock Probe
  misc_feature 92, 93, 94, 95, 96, 97: n = A,T,C or G
gactggaagagcactgttaaaaactctacgatcaaaacaaaacgttggaggctcatcgttcctattcaggcagatgttatcgaggtccgacnnnnnnatacacacgaccaccaactcatacttctcgatcggatacgcatgaggct

SEQ ID NO: 383 - DNA, 146 bp, Artificial Sequence
  Bisulfite Padlock Probe
  misc_feature 92, 93, 94, 95, 96, 97: n = A,T,C or G
gactggaagagcactgttaaaaactctacgatcaaaacgaaacgttggaggctcatcgttcctattcaggcagatgttatcgaggtccgacnnnnnnatacacacgaccaccaactcgtacttctcgatcggatacgcatgaggct

SEQ ID NO: 384 - DNA, 146 bp, Artificial Sequence
  Bisulfite Padlock Probe
  misc_feature 92, 93, 94, 95, 96, 97: n = A,T,C or G
gactggaagagcactgttaaaaactctctactcaataaaacacgttggaggctcatcgttcctattcaggcagatgttatcgaggtccgacnnnnnncgcaacctctaccctaccaccaaaaataagatcggatacgcatgaggct

SEQ ID NO: 385 - DNA, 146 bp, Artificial Sequence
  Bisulfite Padlock Probe
  misc_feature 92, 93, 94, 95, 96, 97: n = A,T,C or G
gactggaagagcactgttaaaaactctctactcaataaaacgcgttggaggctcatcgttcctattcaggcagatgttatcgaggtccgacnnnnnncgcaacctctaccctaccgccaaaaataagatcggatacgcatgaggct

SEQ ID NO: 386 - DNA, 146 bp, Artificial Sequence
  Bisulfite Padlock Probe
  misc_feature 96, 97, 98, 99, 100, 101: n = A,T,C or G
gactggaagagcactgttaaaaactctctccacccatcccctaaaaagttggaggctcatcgttcctattcaggcagatgttatcgaggtccgacnnnnnnaaataaaaatacctaaaaataaaacgatcggatacgcatgaggct

SEQ ID NO: 387 - DNA, 146 bp, Artificial Sequence
  Bisulfite Padlock Probe
  misc_feature 92, 93, 94, 95, 96, 97: n = A,T,C or G
gactggaagagcactgttaaaaactcttcaaacaaaaacccaagttggaggctcatcgttcctattcaggcagatgttatcgaggtccgacnnnnnnacaaaacccgaactccaaaccccaaataagatcggatacgcatgaggct

SEQ ID NO: 388 - DNA, 146 bp, Artificial Sequence
  Bisulfite Padlock Probe
  misc_feature 92, 93, 94, 95, 96, 97: n = A,T,C or G
gactggaagagcactgttaaaaactcttcaaacaaaaacccaagttggaggctcatcgttcctattcaggcagatgttatcgaggtccgacnnnnnnacaaaacccgaactccaaaccccgaataagatcggatacgcatgaggct

SEQ ID NO: 389 - DNA, 146 bp, Artificial Sequence
  Bisulfite Padlock Probe
  misc_feature 96, 97, 98, 99, 100, 101: n = A,T,C or G
gactggaagagcactgttaaaaacttaataaactaaaaatacaccccgttggaggctcatcgttcctattcaggcagatgttatcgaggtccgacnnnnnncgaactccccgcactaccctaaaaagatcggatacgcatgaggct

SEQ ID NO: 390 - DNA, 146 bp, Artificial Sequence
  Bisulfite Padlock Probe
  misc_feature 96, 97, 98, 99, 100, 101: n = A,T,C or G
gactggaagagcactgttaaaaacttaataaactaaaaatacaccccgttggaggctcatcgttcctattcaggcagatgttatcgaggtccgacnnnnnncgaactccccgcgctaccctaaaaagatcggatacgcatgaggct

SEQ ID NO: 391 - DNA, 146 bp, Artificial Sequence
  Bisulfite Padlock Probe
  misc_feature 93, 94, 95, 96, 97, 98: n = A,T,C or G
gactggaagagcactgttaaaaacttacccccgacacctctctcgttggaggctcatcgttcctattcaggcagatgttatcgaggtccgacnnnnnncattaactcttctaactcaccttccatcgatcggatacgcatgaggct

SEQ ID NO: 392 - DNA, 146 bp, Artificial Sequence
  Bisulfite Padlock Probe
  misc_feature 93, 94, 95, 96, 97, 98: n = A,T,C or G
gactggaagagcactgttaaaaacttacccccgacgcctctctcgttggaggctcatcgttcctattcaggcagatgttatcgaggtccgacnnnnnncattaactcttctaactcgccttccatcgatcggatacgcatgaggct

SEQ ID NO: 393 - DNA, 146 bp, Artificial Sequence
  Bisulfite Padlock Probe
  misc_feature 96, 97, 98, 99, 100, 101: n = A,T,C or G
gactggaagagcactgttaaaaacttcaaaacgtttcacccttccccgttggaggctcatcgttcctattcaggcagatgttatcgaggtccgacnnnnnnacccccttcttccacatcccaaaacgatcggatacgcatgaggct

SEQ ID NO: 394 - DNA, 146 bp, Artificial Sequence
  Bisulfite Padlock Probe
  misc_feature 96, 97, 98, 99, 100, 101: n = A,T,C or G
gactggaagagcactgttaaaaacttcaaaacgtttcgcccttccccgttggaggctcatcgttcctattcaggcagatgttatcgaggtccgacnnnnnnacccccttcttccacatcccaaaacgatcggatacgcatgaggct

SEQ ID NO: 395 - DNA, 146 bp, Artificial Sequence
  Bisulfite Padlock Probe
  misc_feature 92, 93, 94, 95, 96, 97: n = A,T,C or G
gactggaagagcactgttaaaaacttccccgtcaccccaactcgttggaggctcatcgttcctattcaggcagatgttatcgaggtccgacnnnnnntcaccctataacaaaataacctcaatttcgatcggatacgcatgaggct

SEQ ID NO: 396 - DNA, 146 bp, Artificial Sequence
  Bisulfite Padlock Probe
  misc_feature 92, 93, 94, 95, 96, 97: n = A,T,C or G
gactggaagagcactgttaaaaacttccccgtcaccccgactcgttggaggctcatcgttcctattcaggcagatgttatcgaggtccgacnnnnnntcaccctataacaaaataacctcgatttcgatcggatacgcatgaggct

SEQ ID NO: 397 - DNA, 146 bp, Artificial Sequence
  Bisulfite Padlock Probe
  misc_feature 94, 95, 96, 97, 98, 99: n = A,T,C or G
gactggaagagcactgttaaaaactttaccaacttcactcttaacgttggaggctcatcgttcctattcaggcagatgttatcgaggtccgacnnnnnnaactcctaaaaacgtaacctaacatccgatcggatacgcatgaggct

SEQ ID NO: 398 - DNA, 146 bp, Artificial Sequence
  Bisulfite Padlock Probe
  misc_feature 94, 95, 96, 97, 98, 99: n = A,T,C or G
gactggaagagcactgttaaaaactttaccaacttcgctcttaacgttggaggctcatcgttcctattcaggcagatgttatcgaggtccgacnnnnnnaactcctaaaaacgtaacctaacgtccgatcggatacgcatgaggct

SEQ ID NO: 399 - DNA, 146 bp, Artificial Sequence
  Bisulfite Padlock Probe
  misc_feature 94, 95, 96, 97, 98, 99: n = A,T,C or G
gactggaagagcactgttaaaaactttcaccctataaactacaaagttggaggctcatcgttcctattcaggcagatgttatcgaggtccgacnnnnnnaacgacgactcgtcctcatccaaactagatcggatacgcatgaggct

SEQ ID NO: 400 - DNA, 146 bp, Artificial Sequence
  Bisulfite Padlock Probe
  misc_feature 94, 95, 96, 97, 98, 99: n = A,T,C or G
gactggaagagcactgttaaaaactttcaccctataaactacgaagttggaggctcatcgttcctattcaggcagatgttatcgaggtccgacnnnnnnaacgacgactcgtcctcgtccaaactagatcggatacgcatgaggct

SEQ ID NO: 401 - DNA, 146 bp, Artificial Sequence
  Bisulfite Padlock Probe
  misc_feature 96, 97, 98, 99, 100, 101: n = A,T,C or G
gactggaagagcactgttaaaaacttttcccgaaaacccgacctacagttggaggctcatcgttcctattcaggcagatgttatcgaggtccgacnnnnnnaccccaccctataccctcctaaaccgatcggatacgcatgaggct

SEQ ID NO: 402 - DNA, 146 bp, Artificial Sequence
  Bisulfite Padlock Probe
  misc_feature 96, 97, 98, 99, 100, 101: n = A,T,C or G
gactggaagagcactgttaaaaacttttcccgaaaacccgacctacggttggaggctcatcgttcctattcaggcagatgttatcgaggtccgacnnnnnnaccccgccctataccctcctaaaccgatcggatacgcatgaggct

SEQ ID NO: 403 - DNA, 146 bp, Artificial Sequence
  Bisulfite Padlock Probe
  misc_feature 95, 96, 97, 98, 99, 100: n = A,T,C or G
gactggaagagcactgttaaaaataaaaataaaacctacaaaccccgttggaggctcatcgttcctattcaggcagatgttatcgaggtccgacnnnnnnatccaaaactaaccaaaactaacaacgatcggatacgcatgaggct

SEQ ID NO: 404 - DNA, 146 bp, Artificial Sequence
  Bisulfite Padlock Probe
  misc_feature 95, 96, 97, 98, 99, 100: n = A,T,C or G
gactggaagagcactgttaaaaataaaaataaaacctacgaaccccgttggaggctcatcgttcctattcaggcagatgttatcgaggtccgacnnnnnnatccaaaactaaccaaaactaacaacgatcggatacgcatgaggct

SEQ ID NO: 405 - DNA, 146 bp, Artificial Sequence
  Bisulfite Padlock Probe
  misc_feature 95, 96, 97, 98, 99, 100: n = A,T,C or G
gactggaagagcactgttaaaaataaaaatactaccgtacaaccacgttggaggctcatcgttcctattcaggcagatgttatcgaggtccgacnnnnnnaaaaaccaaacacaaacaattaaaaagatcggatacgcatgaggct

SEQ ID NO: 406 - DNA, 146 bp, Artificial Sequence
  Bisulfite Padlock Probe
  misc_feature 95, 96, 97, 98, 99, 100: n = A,T,C or G
gactggaagagcactgttaaaaataaaaatactaccgtacaaccgcgttggaggctcatcgttcctattcaggcagatgttatcgaggtccgacnnnnnnaaaaaccaaacgcaaacaattaaaaagatcggatacgcatgaggct

SEQ ID NO: 407 - DNA, 146 bp, Artificial Sequence
  Bisulfite Padlock Probe
  misc_feature 96, 97, 98, 99, 100, 101: n = A,T,C or G
gactggaagagcactgttaaaaataaaacactaaaacgccaacaaacgttggaggctcatcgttcctattcaggcagatgttatcgaggtccgacnnnnnntttaaaatcaaacatttaaatttttgatcggatacgcatgaggct

SEQ ID NO: 408 - DNA, 146 bp, Artificial Sequence
  Bisulfite Padlock Probe
  misc_feature 96, 97, 98, 99, 100, 101: n = A,T,C or G
gactggaagagcactgttaaaaataaaacactaaaacgccgacaaacgttggaggctcatcgttcctattcaggcagatgttatcgaggtccgacnnnnnntttaaaatcaaacatttaaatttttgatcggatacgcatgaggct

SEQ ID NO: 409 - DNA, 146 bp, Artificial Sequence
  Bisulfite Padlock Probe
  misc_feature 96, 97, 98, 99, 100, 101: n = A,T,C or G
gactggaagagcactgttaaaaataaaactccgaacaccaaaaataagttggaggctcatcgttcctattcaggcagatgttatcgaggtccgacnnnnnnctacgaaaacaaaaccaaataaaaagatcggatacgcatgaggct

SEQ ID NO: 410 - DNA, 146 bp, Artificial Sequence
  Bisulfite Padlock Probe
  misc_feature 96, 97, 98, 99, 100, 101: n = A,T,C or G
gactggaagagcactgttaaaaataaaactccgaacaccgaaaataagttggaggctcatcgttcctattcaggcagatgttatcgaggtccgacnnnnnnctacgaaaacgaaaccaaataaaaagatcggatacgcatgaggct

SEQ ID NO: 411 - DNA, 146 bp, Artificial Sequence
  Bisulfite Padlock Probe
  misc_feature 93, 94, 95, 96, 97, 98: n = A,T,C or G
gactggaagagcactgttaaaaataaaataaaataccaaatttcgttggaggctcatcgttcctattcaggcagatgttatcgaggtccgacnnnnnnaaattcccccgaaattctccataaaacagatcggatacgcatgaggct

SEQ ID NO: 412 - DNA, 146 bp, Artificial Sequence
  Bisulfite Padlock Probe
  misc_feature 93, 94, 95, 96, 97, 98: n = A,T,C or G
gactggaagagcactgttaaaaataaaataaaataccgaatttcgttggaggctcatcgttcctattcaggcagatgttatcgaggtccgacnnnnnnaaattcccccgaaattctccataaaacggatcggatacgcatgaggct

SEQ ID NO: 413 - DNA, 146 bp, Artificial Sequence
  Bisulfite Padlock Probe
  misc_feature 96, 97, 98, 99, 100, 101: n = A,T,C or G
gactggaagagcactgttaaaaataaaataactccaaccctaaccaagttggaggctcatcgttcctattcaggcagatgttatcgaggtccgacnnnnnncaataacccgacaccaaatacccccgatcggatacgcatgaggct

SEQ ID NO: 414 - DNA, 146 bp, Artificial Sequence
  Bisulfite Padlock Probe
  misc_feature 96, 97, 98, 99, 100, 101: n = A,T,C or G
gactggaagagcactgttaaaaataaaataactccgaccctaaccaagttggaggctcatcgttcctattcaggcagatgttatcgaggtccgacnnnnnncaataacccgacgccaaatacccccgatcggatacgcatgaggct

SEQ ID NO: 415 - DNA, 146 bp, Artificial Sequence
  Bisulfite Padlock Probe
  misc_feature 95, 96, 97, 98, 99, 100: n = A,T,C or G
gactggaagagcactgttaaaaataaaatattacctacccgacaacgttggaggctcatcgttcctattcaggcagatgttatcgaggtccgacnnnnnnaaaacaacaacgcgcattctaaccccgatcggatacgcatgaggct

SEQ ID NO: 416 - DNA, 146 bp, Artificial Sequence
  Bisulfite Padlock Probe
  misc_feature 95, 96, 97, 98, 99, 100: n = A,T,C or G
gactggaagagcactgttaaaaataaaatattacctacccgacgacgttggaggctcatcgttcctattcaggcagatgttatcgaggtccgacnnnnnnaaaacaacaacgcgcgttctaaccccgatcggatacgcatgaggct

SEQ ID NO: 417 - DNA, 146 bp, Artificial Sequence
  Bisulfite Padlock Probe
  misc_feature 92, 93, 94, 95, 96, 97: n = A,T,C or G
gactggaagagcactgttaaaaataaaattccccacttctcttgttggaggctcatcgttcctattcaggcagatgttatcgaggtccgacnnnnnnataaactacaattatcgacaaactatacagatcggatacgcatgaggct

SEQ ID NO: 418 - DNA, 146 bp, Artificial Sequence
  Bisulfite Padlock Probe
  misc_feature 92, 93, 94, 95, 96, 97: n = A,T,C or G
gactggaagagcactgttaaaaataaaattccccacttctcttgttggaggctcatcgttcctattcaggcagatgttatcgaggtccgacnnnnnnataaactacaattatcgacaaactatacggatcggatacgcatgaggct

SEQ ID NO: 419 - DNA, 146 bp, Artificial Sequence
  Bisulfite Padlock Probe
  misc_feature 96, 97, 98, 99, 100, 101: n = A,T,C or G
gactggaagagcactgttaaaaataaacacgcactaaaccctaaaccgttggaggctcatcgttcctattcaggcagatgttatcgaggtccgacnnnnnnctaccctcccctataaaacaaaaaagatcggatacgcatgaggct

SEQ ID NO: 420 - DNA, 146 bp, Artificial Sequence
  Bisulfite Padlock Probe
  misc_feature 96, 97, 98, 99, 100, 101: n = A,T,C or G
gactggaagagcactgttaaaaataaacacgcgctaaaccctaaaccgttggaggctcatcgttcctattcaggcagatgttatcgaggtccgacnnnnnnctaccctcccctataaaacgaaaaagatcggatacgcatgaggct

SEQ ID NO: 421 - DNA, 146 bp, Artificial Sequence
  Bisulfite Padlock Probe
  misc_feature 92, 93, 94, 95, 96, 97: n = A,T,C or G
gactggaagagcactgttaaaaataaaccataacaaccccaacgttggaggctcatcgttcctattcaggcagatgttatcgaggtccgacnnnnnnccacactccccaacaaatacctcaacaacgatcggatacgcatgaggct

SEQ ID NO: 422 - DNA, 146 bp, Artificial Sequence
  Bisulfite Padlock Probe
  misc_feature 92, 93, 94, 95, 96, 97: n = A,T,C or G
gactggaagagcactgttaaaaataaaccataacaaccccgacgttggaggctcatcgttcctattcaggcagatgttatcgaggtccgacnnnnnnccacactccccaacaaatacctcgacaacgatcggatacgcatgaggct

SEQ ID NO: 423 - DNA, 146 bp, Artificial Sequence
  Bisulfite Padlock Probe
  misc_feature 95, 96, 97, 98, 99, 100: n = A,T,C or G
gactggaagagcactgttaaaaataaacccgatactaaccaaaaaagttggaggctcatcgttcctattcaggcagatgttatcgaggtccgacnnnnnncaaaatacgaaaaatacaaaaaatacgatcggatacgcatgaggct

SEQ ID NO: 424 - DNA, 146 bp, Artificial Sequence
  Bisulfite Padlock Probe
  misc_feature 95, 96, 97, 98, 99, 100: n = A,T,C or G
gactggaagagcactgttaaaaataaacccgatactaaccgaaaaagttggaggctcatcgttcctattcaggcagatgttatcgaggtccgacnnnnnncaaaatacgaaaaatacgaaaaatacgatcggatacgcatgaggct

SEQ ID NO: 425 - DNA, 146 bp, Artificial Sequence
  Bisulfite Padlock Probe
  misc_feature 95, 96, 97, 98, 99, 100: n = A,T,C or G
gactggaagagcactgttaaaaataaataaaaataacctcaaatccgttggaggctcatcgttcctattcaggcagatgttatcgaggtccgacnnnnnngaaaaacgcgacaccgcaaaaacaacgatcggatacgcatgaggct

SEQ ID NO: 426 - DNA, 146 bp, Artificial Sequence
  Bisulfite Padlock Probe
  misc_feature 95, 96, 97, 98, 99, 100: n = A,T,C or G
gactggaagagcactgttaaaaataaataaaaataacctcgaatccgttggaggctcatcgttcctattcaggcagatgttatcgaggtccgacnnnnnngaaaaacgcgacaccgcgaaaacaacgatcggatacgcatgaggct

SEQ ID NO: 427 - DNA, 146 bp, Artificial Sequence
  Bisulfite Padlock Probe
  misc_feature 94, 95, 96, 97, 98, 99: n = A,T,C or G
gactggaagagcactgttaaaaataacaaacgcgcgataccaaaagttggaggctcatcgttcctattcaggcagatgttatcgaggtccgacnnnnnnacttcgatttacatttaaaactccttcgatcggatacgcatgaggct

SEQ ID NO: 428 - DNA, 146 bp, Artificial Sequence
  Bisulfite Padlock Probe
  misc_feature 94, 95, 96, 97, 98, 99: n = A,T,C or G
gactggaagagcactgttaaaaataacaaacgcgcgataccgaaagttggaggctcatcgttcctattcaggcagatgttatcgaggtccgacnnnnnnacttcgatttacgtttaaaactccttcgatcggatacgcatgaggct

SEQ ID NO: 429 - DNA, 146 bp, Artificial Sequence
  Bisulfite Padlock Probe
  misc_feature 93, 94, 95, 96, 97, 98: n = A,T,C or G
gactggaagagcactgttaaaaataacaccacataaaaccaaaagttggaggctcatcgttcctattcaggcagatgttatcgaggtccgacnnnnnnaaaccactccccaacctaaaaaccaaaagatcggatacgcatgaggct

SEQ ID NO: 430 - DNA, 146 bp, Artificial Sequence
  Bisulfite Padlock Probe
  misc_feature 92, 93, 94, 95, 96, 97: n = A,T,C or G
gactggaagagcactgttaaaaataaccaaacccgatcataaagttggaggctcatcgttcctattcaggcagatgttatcgaggtccgacnnnnnnccatacccaaaacctaaaaatacaaaaccgatcggatacgcatgaggct

SEQ ID NO: 431 - DNA, 146 bp, Artificial Sequence
  Bisulfite Padlock Probe
  misc_feature 92, 93, 94, 95, 96, 97: n = A,T,C or G
gactggaagagcactgttaaaaataaccaaacccgatcgtaaagttggaggctcatcgttcctattcaggcagatgttatcgaggtccgacnnnnnnccgtacccaaaacctaaaaatacaaaaccgatcggatacgcatgaggct

SEQ ID NO: 432 - DNA, 146 bp, Artificial Sequence
  Bisulfite Padlock Probe
  misc_feature 93, 94, 95, 96, 97, 98: n = A,T,C or G
gactggaagagcactgttaaaaataacccaaccaaaaaccacccgttggaggctcatcgttcctattcaggcagatgttatcgaggtccgacnnnnnnttcctcctcccgcaatttcaattaacccgatcggatacgcatgaggct

SEQ ID NO: 433 - DNA, 146 bp, Artificial Sequence
  Bisulfite Padlock Probe
  misc_feature 93, 94, 95, 96, 97, 98: n = A,T,C or G
gactggaagagcactgttaaaaataacccaaccaaaaaccgcccgttggaggctcatcgttcctattcaggcagatgttatcgaggtccgacnnnnnnttcctcctcccgcgatttcaattaacccgatcggatacgcatgaggct

SEQ ID NO: 434 - DNA, 146 bp, Artificial Sequence
  Bisulfite Padlock Probe
  misc_feature 96, 97, 98, 99, 100, 101: n = A,T,C or G
gactggaagagcactgttaaaaataacccttaccgatcaaaatccacgttggaggctcatcgttcctattcaggcagatgttatcgaggtccgacnnnnnnaaactacgacgcgcgaaaaccaaatgatcggatacgcatgaggct

SEQ ID NO: 435 - DNA, 146 bp, Artificial Sequence
  Bisulfite Padlock Probe
  misc_feature 96, 97, 98, 99, 100, 101: n = A,T,C or G
gactggaagagcactgttaaaaataacccttaccgatcaaaatccgcgttggaggctcatcgttcctattcaggcagatgttatcgaggtccgacnnnnnnaaactacgacgcgcgaaaaccgaatgatcggatacgcatgaggct

SEQ ID NO: 436 - DNA, 146 bp, Artificial Sequence
  Bisulfite Padlock Probe
  misc_feature 92, 93, 94, 95, 96, 97: n = A,T,C or G
gactggaagagcactgttaaaaataaccttctacaaactaaacgttggaggctcatcgttcctattcaggcagatgttatcgaggtccgacnnnnnnctaaaccgcttcccaaacactctactaaagatcggatacgcatgaggct

SEQ ID NO: 437 - DNA, 146 bp, Artificial Sequence
  Bisulfite Padlock Probe
  misc_feature 92, 93, 94, 95, 96, 97: n = A,T,C or G
gactggaagagcactgttaaaaataaccttctacgaactaaacgttggaggctcatcgttcctattcaggcagatgttatcgaggtccgacnnnnnnctaaaccgcttcccgaacactctactaaagatcggatacgcatgaggct

SEQ ID NO: 438 - DNA, 146 bp, Artificial Sequence
  Bisulfite Padlock Probe
  misc_feature 93, 94, 95, 96, 97, 98: n = A,T,C or G
gactggaagagcactgttaaaaataactaaacgaaataaacaccgttggaggctcatcgttcctattcaggcagatgttatcgaggtccgacnnnnnnaaaaacgacgaacgcaaactcctctaccgatcggatacgcatgaggct

SEQ ID NO: 439 - DNA, 146 bp, Artificial Sequence
  Bisulfite Padlock Probe
  misc_feature 93, 94, 95, 96, 97, 98: n = A,T,C or G
gactggaagagcactgttaaaaataactaaacgaaataaacgccgttggaggctcatcgttcctattcaggcagatgttatcgaggtccgacnnnnnnaaaaacgacgaacgcgaactcctctaccgatcggatacgcatgaggct

SEQ ID NO: 440 - DNA, 146 bp, Artificial Sequence
  Bisulfite Padlock Probe
  misc_feature 92, 93, 94, 95, 96, 97: n = A,T,C or G
gactggaagagcactgttaaaaataataaaaacccaacaacccgttggaggctcatcgttcctattcaggcagatgttatcgaggtccgacnnnnnnttaaataacccacaaataaaattcttctcgatcggatacgcatgaggct

SEQ ID NO: 441 - DNA, 146 bp, Artificial Sequence
  Bisulfite Padlock Probe
  misc_feature 93, 94, 95, 96, 97, 98: n = A,T,C or G
gactggaagagcactgttaaaaataataaaacgctcaaaataacgttggaggctcatcgttcctattcaggcagatgttatcgaggtccgacnnnnnnaaaaaccacccaccacaacaaactaaccgatcggatacgcatgaggct

SEQ ID NO: 442 - DNA, 146 bp, Artificial Sequence
  Bisulfite Padlock Probe
  misc_feature 93, 94, 95, 96, 97, 98: n = A,T,C or G
gactggaagagcactgttaaaaataataaaacgctcgaaataacgttggaggctcatcgttcctattcaggcagatgttatcgaggtccgacnnnnnnaaaaaccacccaccacaacgaactaaccgatcggatacgcatgaggct

SEQ ID NO: 443 - DNA, 146 bp, Artificial Sequence
  Bisulfite Padlock Probe
  misc_feature 95, 96, 97, 98, 99, 100: n = A,T,C or G
gactggaagagcactgttaaaaataataaaatcaattaaaaacaccgttggaggctcatcgttcctattcaggcagatgttatcgaggtccgacnnnnnnaccccgaaatattttctaacgcaatcgatcggatacgcatgaggct

SEQ ID NO: 444 - DNA, 146 bp, Artificial Sequence
  Bisulfite Padlock Probe
  misc_feature 95, 96, 97, 98, 99, 100: n = A,T,C or G
gactggaagagcactgttaaaaataataaaatcaattaaaaacgccgttggaggctcatcgttcctattcaggcagatgttatcgaggtccgacnnnnnnaccccgaaatattttctaacgcgatcgatcggatacgcatgaggct

SEQ ID NO: 445 - DNA, 146 bp, Artificial Sequence
  Bisulfite Padlock Probe
  misc_feature 92, 93, 94, 95, 96, 97: n = A,T,C or G
gactggaagagcactgttaaaaataataaaccccaaaaactacgttggaggctcatcgttcctattcaggcagatgttatcgaggtccgacnnnnnnaccaaccaaacaaccctttcctacaaatagatcggatacgcatgaggct

SEQ ID NO: 446 - DNA, 146 bp, Artificial Sequence
  Bisulfite Padlock Probe
  misc_feature 92, 93, 94, 95, 96, 97: n = A,T,C or G
gactggaagagcactgttaaaaataataaaccccgaaaactacgttggaggctcatcgttcctattcaggcagatgttatcgaggtccgacnnnnnnaccaaccaaacaaccctttcctacgaatagatcggatacgcatgaggct

SEQ ID NO: 447 - DNA, 146 bp, Artificial Sequence
  Bisulfite Padlock Probe
  misc_feature 92, 93, 94, 95, 96, 97: n = A,T,C or G
gactggaagagcactgttaaaaataataattaaaacaaaaaacgttggaggctcatcgttcctattcaggcagatgttatcgaggtccgacnnnnnnaactcccacgtaacattttaccttctatcgatcggatacgcatgaggct

SEQ ID NO: 448 - DNA, 146 bp, Artificial Sequence
  Bisulfite Padlock Probe
  misc_feature 92, 93, 94, 95, 96, 97: n = A,T,C or G
gactggaagagcactgttaaaaataataattaaaacgaaaaacgttggaggctcatcgttcctattcaggcagatgttatcgaggtccgacnnnnnnaactcccacgtaacgttttaccttctatcgatcggatacgcatgaggct

SEQ ID NO: 449 - DNA, 146 bp, Artificial Sequence
  Bisulfite Padlock Probe
  misc_feature 92, 93, 94, 95, 96, 97: n = A,T,C or G
gactggaagagcactgttaaaaataatcatcaacccccaaaaagttggaggctcatcgttcctattcaggcagatgttatcgaggtccgacnnnnnnacccatcaaaataaaacaaaccactttaagatcggatacgcatgaggct

SEQ ID NO: 450 - DNA, 146 bp, Artificial Sequence
  Bisulfite Padlock Probe
  misc_feature 92, 93, 94, 95, 96, 97: n = A,T,C or G
gactggaagagcactgttaaaaataatcatcgacccccaaaaagttggaggctcatcgttcctattcaggcagatgttatcgaggtccgacnnnnnnacccatcaaaataaaacaaaccgctttaagatcggatacgcatgaggct

SEQ ID NO: 451 - DNA, 146 bp, Artificial Sequence
  Bisulfite Padlock Probe
  misc_feature 94, 95, 96, 97, 98, 99: n = A,T,C or G
gactggaagagcactgttaaaaataatcctttaaccctaaaacctgttggaggctcatcgttcctattcaggcagatgttatcgaggtccgacnnnnnnaaataacaacgactttacaaaaaacccgatcggatacgcatgaggct

SEQ ID NO: 452 - DNA, 146 bp, Artificial Sequence
  Bisulfite Padlock Probe
  misc_feature 94, 95, 96, 97, 98, 99: n = A,T,C or G
gactggaagagcactgttaaaaataatcctttaaccctaaaacctgttggaggctcatcgttcctattcaggcagatgttatcgaggtccgacnnnnnnaaataacaacgactttacgaaaaacccgatcggatacgcatgaggct

SEQ ID NO: 453 - DNA, 146 bp, Artificial Sequence
  Bisulfite Padlock Probe
  misc_feature 96, 97, 98, 99, 100, 101: n = A,T,C or G
gactggaagagcactgttaaaaataattacgttcacaaaacataaaagttggaggctcatcgttcctattcaggcagatgttatcgaggtccgacnnnnnnaaaaacctaaaaattaacacaaaaagatcggatacgcatgaggct

SEQ ID NO: 454 - DNA, 146 bp, Artificial Sequence
  Bisulfite Padlock Probe
  misc_feature 96, 97, 98, 99, 100, 101: n = A,T,C or G
gactggaagagcactgttaaaaataattacgttcacgaaacataaaagttggaggctcatcgttcctattcaggcagatgttatcgaggtccgacnnnnnnaaaaacctaaaaattaacacaaaaagatcggatacgcatgaggct

SEQ ID NO: 455 - DNA, 146 bp, Artificial Sequence
  Bisulfite Padlock Probe
  misc_feature 92, 93, 94, 95, 96, 97: n = A,T,C or G
gactggaagagcactgttaaaaatacaaaacccaaacctcaacgttggaggctcatcgttcctattcaggcagatgttatcgaggtccgacnnnnnnaaaccttcaacattcaaaacttcaataacgatcggatacgcatgaggct

SEQ ID NO: 456 - DNA, 146 bp, Artificial Sequence
  Bisulfite Padlock Probe
  misc_feature 92, 93, 94, 95, 96, 97: n = A,T,C or G
gactggaagagcactgttaaaaatacaaattaattattaacccgttggaggctcatcgttcctattcaggcagatgttatcgaggtccgacnnnnnnttttacccgacaaaatcttaacaccaatagatcggatacgcatgaggct

SEQ ID NO: 457 - DNA, 146 bp, Artificial Sequence
  Bisulfite Padlock Probe
  misc_feature 92, 93, 94, 95, 96, 97: n = A,T,C or G
gactggaagagcactgttaaaaataccgcaaatataaatccccgttggaggctcatcgttcctattcaggcagatgttatcgaggtccgacnnnnnnccaactataaaaatttacaaaaacttaaagatcggatacgcatgaggct

SEQ ID NO: 458 - DNA, 146 bp, Artificial Sequence
  Bisulfite Padlock Probe
  misc_feature 92, 93, 94, 95, 96, 97: n = A,T,C or G
gactggaagagcactgttaaaaataccgcgaatataaatccccgttggaggctcatcgttcctattcaggcagatgttatcgaggtccgacnnnnnnccaactataaaaatttacgaaaacttaaagatcggatacgcatgaggct

SEQ ID NO: 459 - DNA, 146 bp, Artificial Sequence
  Bisulfite Padlock Probe
  misc_feature 92, 93, 94, 95, 96, 97: n = A,T,C or G
gactggaagagcactgttaaaaatacgaaacccaaacctcaacgttggaggctcatcgttcctattcaggcagatgttatcgaggtccgacnnnnnnaaaccttcaacattcaaaacttcgataacgatcggatacgcatgaggct

SEQ ID NO: 460 - DNA, 146 bp, Artificial Sequence
  Bisulfite Padlock Probe
  misc_feature 92, 93, 94, 95, 96, 97: n = A,T,C or G
gactggaagagcactgttaaaaatacgaattaattattaacccgttggaggctcatcgttcctattcaggcagatgttatcgaggtccgacnnnnnnttttacccgacaaaatcttaacgccaatagatcggatacgcatgaggct

SEQ ID NO: 461 - DNA, 146 bp, Artificial Sequence
  Bisulfite Padlock Probe
  misc_feature 92, 93, 94, 95, 96, 97: n = A,T,C or G
gactggaagagcactgttaaaaatacgccgcgaccacatcaacgttggaggctcatcgttcctattcaggcagatgttatcgaggtccgacnnnnnnccaacactataaccataaaactactcaacgatcggatacgcatgaggct

SEQ ID NO: 462 - DNA, 146 bp, Artificial Sequence
  Bisulfite Padlock Probe
  misc_feature 92, 93, 94, 95, 96, 97: n = A,T,C or G
gactggaagagcactgttaaaaatacgccgcgaccgcatcaacgttggaggctcatcgttcctattcaggcagatgttatcgaggtccgacnnnnnnccaacactataaccgtaaaactactcaacgatcggatacgcatgaggct

SEQ ID NO: 463 - DNA, 146 bp, Artificial Sequence
  Bisulfite Padlock Probe
  misc_feature 93, 94, 95, 96, 97, 98: n = A,T,C or G
gactggaagagcactgttaaaaatactcactataaaacacactagttggaggctcatcgttcctattcaggcagatgttatcgaggtccgacnnnnnnaaattttaaaatccgacgacaactaaccgatcggatacgcatgaggct

SEQ ID NO: 464 - DNA, 146 bp, Artificial Sequence
  Bisulfite Padlock Probe
  misc_feature 93, 94, 95, 96, 97, 98: n = A,T,C or G
gactggaagagcactgttaaaaatactcactataaaacacgctagttggaggctcatcgttcctattcaggcagatgttatcgaggtccgacnnnnnnaaattttaaaatccgacgacgactaaccgatcggatacgcatgaggct

SEQ ID NO: 465 - DNA, 146 bp, Artificial Sequence
  Bisulfite Padlock Probe
  misc_feature 95, 96, 97, 98, 99, 100: n = A,T,C or G
gactggaagagcactgttaaaaatataacaccaacctcaatatctagttggaggctcatcgttcctattcaggcagatgttatcgaggtccgacnnnnnncaaaaccaaatccaccgaccaaaaacgatcggatacgcatgaggct

SEQ ID NO: 466 - DNA, 146 bp, Artificial Sequence
  Bisulfite Padlock Probe
  misc_feature 95, 96, 97, 98, 99, 100: n = A,T,C or G
gactggaagagcactgttaaaaatataacaccgacctcaatatctagttggaggctcatcgttcctattcaggcagatgttatcgaggtccgacnnnnnncaaaaccaaatccaccgaccgaaaacgatcggatacgcatgaggct

SEQ ID NO: 467 - DNA, 146 bp, Artificial Sequence
  Bisulfite Padlock Probe
  misc_feature 92, 93, 94, 95, 96, 97: n = A,T,C or G
gactggaagagcactgttaaaaatatacaacgctacgccaaacgttggaggctcatcgttcctattcaggcagatgttatcgaggtccgacnnnnnnactaacgttaacgaaccgatcaataacttgatcggatacgcatgaggct

SEQ ID NO: 468 - DNA, 146 bp, Artificial Sequence
  Bisulfite Padlock Probe
  misc_feature 92, 93, 94, 95, 96, 97: n = A,T,C or G
gactggaagagcactgttaaaaatatacaacgctacgccgaacgttggaggctcatcgttcctattcaggcagatgttatcgaggtccgacnnnnnnactaacgttaacgaaccgatcgataacttgatcggatacgcatgaggct

SEQ ID NO: 469 - DNA, 146 bp, Artificial Sequence
  Bisulfite Padlock Probe
  misc_feature 96, 97, 98, 99, 100, 101: n = A,T,C or G
gactggaagagcactgttaaaaatatacccctcacccatccccaaatgttggaggctcatcgttcctattcaggcagatgttatcgaggtccgacnnnnnnaaacgacgaaacccgcaccaaaaacgatcggatacgcatgaggct

SEQ ID NO: 470 - DNA, 146 bp, Artificial Sequence
  Bisulfite Padlock Probe
  misc_feature 96, 97, 98, 99, 100, 101: n = A,T,C or G
gactggaagagcactgttaaaaatatacccctcacccatccccaaatgttggaggctcatcgttcctattcaggcagatgttatcgaggtccgacnnnnnnaaacgacgaaacccgcaccgaaaacgatcggatacgcatgaggct

SEQ ID NO: 471 - DNA, 146 bp, Artificial Sequence
  Bisulfite Padlock Probe
  misc_feature 92, 93, 94, 95, 96, 97: n = A,T,C or G
gactggaagagcactgttaaaaatatataactcctaaatccccgttggaggctcatcgttcctattcaggcagatgttatcgaggtccgacnnnnnnaaaaataaccgaataaaaacataacaatagatcggatacgcatgaggct

SEQ ID NO: 472 - DNA, 146 bp, Artificial Sequence
  Bisulfite Padlock Probe
  misc_feature 92, 93, 94, 95, 96, 97: n = A,T,C or G
gactggaagagcactgttaaaaatatataactcctaaatccccgttggaggctcatcgttcctattcaggcagatgttatcgaggtccgacnnnnnnaaaaataaccgaataaaaacgtaacaatagatcggatacgcatgaggct

SEQ ID NO: 473 - DNA, 146 bp, Artificial Sequence
  Bisulfite Padlock Probe
  misc_feature 92, 93, 94, 95, 96, 97: n = A,T,C or G
gactggaagagcactgttaaaaatatctaatatctctaaaacagttggaggctcatcgttcctattcaggcagatgttatcgaggtccgacnnnnnntatttttctctctttaatctattctattcgatcggatacgcatgaggct

SEQ ID NO: 474 - DNA, 146 bp, Artificial Sequence
  Bisulfite Padlock Probe
  misc_feature 95, 96, 97, 98, 99, 100: n = A,T,C or G
gactggaagagcactgttaaaaatattcatcaaatatttaaaacaagttggaggctcatcgttcctattcaggcagatgttatcgaggtccgacnnnnnnaaaaacacctcctcaccccctaccctgatcggatacgcatgaggct

SEQ ID NO: 475 - DNA, 146 bp, Artificial Sequence
  Bisulfite Padlock Probe
  misc_feature 92, 93, 94, 95, 96, 97: n = A,T,C or G
gactggaagagcactgttaaaaatattcgcgacgccttcacccgttggaggctcatcgttcctattcaggcagatgttatcgaggtccgacnnnnnnaaaaacgcttcatcgccaaaatacactccgatcggatacgcatgaggct

SEQ ID NO: 476 - DNA, 146 bp, Artificial Sequence
  Bisulfite Padlock Probe
  misc_feature 92, 93, 94, 95, 96, 97: n = A,T,C or G
gactggaagagcactgttaaaaatattcgcgacgccttcgcccgttggaggctcatcgttcctattcaggcagatgttatcgaggtccgacnnnnnnaaaaacgcttcatcgccaaaatacgctccgatcggatacgcatgaggct

SEQ ID NO: 477 - DNA, 146 bp, Artificial Sequence
  Bisulfite Padlock Probe
  misc_feature 95, 96, 97, 98, 99, 100: n = A,T,C or G
gactggaagagcactgttaaaaatattcgtcaaatatttaaaacaagttggaggctcatcgttcctattcaggcagatgttatcgaggtccgacnnnnnnaaaaacacctcctcaccccctaccctgatcggatacgcatgaggct

SEQ ID NO: 478 - DNA, 146 bp, Artificial Sequence
  Bisulfite Padlock Probe
  misc_feature 95, 96, 97, 98, 99, 100: n = A,T,C or G
gactggaagagcactgttaaaaatcaaaaacgcaaccacaatccccgttggaggctcatcgttcctattcaggcagatgttatcgaggtccgacnnnnnnctacacctctaaataaactctcccccgatcggatacgcatgaggct

SEQ ID NO: 479 - DNA, 146 bp, Artificial Sequence
  Bisulfite Padlock Probe
  misc_feature 95, 96, 97, 98, 99, 100: n = A,T,C or G
gactggaagagcactgttaaaaatcaaaaacgcaaccgcaatccccgttggaggctcatcgttcctattcaggcagatgttatcgaggtccgacnnnnnnctacgcctctaaataaactctcccccgatcggatacgcatgaggct

SEQ ID NO: 480 - DNA, 146 bp, Artificial Sequence
  Bisulfite Padlock Probe
  misc_feature 93, 94, 95, 96, 97, 98: n = A,T,C or G
gactggaagagcactgttaaaaatcaaaccccaccactaaaacagttggaggctcatcgttcctattcaggcagatgttatcgaggtccgacnnnnnncaacaacgacaacgccgactcaaaaaacgatcggatacgcatgaggct

SEQ ID NO: 481 - DNA, 146 bp, Artificial Sequence
  Bisulfite Padlock Probe
  misc_feature 93, 94, 95, 96, 97, 98: n = A,T,C or G
gactggaagagcactgttaaaaatcaaaccccgccactaaaacagttggaggctcatcgttcctattcaggcagatgttatcgaggtccgacnnnnnncaacaacgacaacgccgactcgaaaaacgatcggatacgcatgaggct

SEQ ID NO: 482 - DNA, 146 bp, Artificial Sequence
  Bisulfite Padlock Probe
  misc_feature 94, 95, 96, 97, 98, 99: n = A,T,C or G
gactggaagagcactgttaaaaatcaaacctaaacccctcaaaaagttggaggctcatcgttcctattcaggcagatgttatcgaggtccgacnnnnnnccaaaccccaaactaaaactccctatcgatcggatacgcatgaggct

SEQ ID NO: 483 - DNA, 146 bp, Artificial Sequence
  Bisulfite Padlock Probe
  misc_feature 92, 93, 94, 95, 96, 97: n = A,T,C or G
gactggaagagcactgttaaaaatcactctttatcatataaatgttggaggctcatcgttcctattcaggcagatgttatcgaggtccgacnnnnnnactaaaaataacttaatcacatctctaccgatcggatacgcatgaggct

SEQ ID NO: 484 - DNA, 146 bp, Artificial Sequence
  Bisulfite Padlock Probe
  misc_feature 92, 93, 94, 95, 96, 97: n = A,T,C or G
gactggaagagcactgttaaaaatcactctttatcatataaatgttggaggctcatcgttcctattcaggcagatgttatcgaggtccgacnnnnnnactaaaaataacttaatcacgtctctaccgatcggatacgcatgaggct

SEQ ID NO: 485 - DNA, 146 bp, Artificial Sequence
  Bisulfite Padlock Probe
  misc_feature 94, 95, 96, 97, 98, 99: n = A,T,C or G
gactggaagagcactgttaaaaatccaacctctataactctataagttggaggctcatcgttcctattcaggcagatgttatcgaggtccgacnnnnnntctaatcacatctttcattcaaaatttgatcggatacgcatgaggct

SEQ ID NO: 486 - DNA, 146 bp, Artificial Sequence
  Bisulfite Padlock Probe
  misc_feature 93, 94, 95, 96, 97, 98: n = A,T,C or G
gactggaagagcactgttaaaaatccactaaaaacaaaactaatgttggaggctcatcgttcctattcaggcagatgttatcgaggtccgacnnnnnnaaccgcaacattctttacaccaaaaattgatcggatacgcatgaggct

SEQ ID NO: 487 - DNA, 146 bp, Artificial Sequence
  Bisulfite Padlock Probe
  misc_feature 93, 94, 95, 96, 97, 98: n = A,T,C or G
gactggaagagcactgttaaaaatcccaacaataccccttaaccgttggaggctcatcgttcctattcaggcagatgttatcgaggtccgacnnnnnntctaccaccaaaaacttaaaccaatctagatcggatacgcatgaggct

SEQ ID NO: 488 - DNA, 146 bp, Artificial Sequence
  Bisulfite Padlock Probe
  misc_feature 93, 94, 95, 96, 97, 98: n = A,T,C or G
gactggaagagcactgttaaaaatcccaacaataccccttaaccgttggaggctcatcgttcctattcaggcagatgttatcgaggtccgacnnnnnntctaccaccgaaaacttaaaccaatctagatcggatacgcatgaggct

SEQ ID NO: 489 - DNA, 146 bp, Artificial Sequence
  Bisulfite Padlock Probe
  misc_feature 94, 95, 96, 97, 98, 99: n = A,T,C or G
gactggaagagcactgttaaaaatcccccaccccaacatactcccgttggaggctcatcgttcctattcaggcagatgttatcgaggtccgacnnnnnncgcactaccccaaactcaaattaaaaagatcggatacgcatgaggct

SEQ ID NO: 490 - DNA, 146 bp, Artificial Sequence
  Bisulfite Padlock Probe
  misc_feature 94, 95, 96, 97, 98, 99: n = A,T,C or G
gactggaagagcactgttaaaaatcccccaccccaacatactcccgttggaggctcatcgttcctattcaggcagatgttatcgaggtccgacnnnnnncgcactaccccgaactcaaattaaaaagatcggatacgcatgaggct

SEQ ID NO: 491 - DNA, 146 bp, Artificial Sequence
  Bisulfite Padlock Probe
  misc_feature 92, 93, 94, 95, 96, 97: n = A,T,C or G
gactggaagagcactgttaaaaatcccttacgctaacgacaccgttggaggctcatcgttcctattcaggcagatgttatcgaggtccgacnnnnnnaactcacgaacccaacaaccaaatcaaacgatcggatacgcatgaggct

SEQ ID NO: 492 - DNA, 146 bp, Artificial Sequence
  Bisulfite Padlock Probe
  misc_feature 92, 93, 94, 95, 96, 97: n = A,T,C or G
gactggaagagcactgttaaaaatcccttacgctaacgacgccgttggaggctcatcgttcctattcaggcagatgttatcgaggtccgacnnnnnnaactcacgaacccaacgaccaaatcaaacgatcggatacgcatgaggct

SEQ ID NO: 493 - DNA, 146 bp, Artificial Sequence
  Bisulfite Padlock Probe
  misc_feature 94, 95, 96, 97, 98, 99: n = A,T,C or G
gactggaagagcactgttaaaaatccgaacgcttaaaacacttacgttggaggctcatcgttcctattcaggcagatgttatcgaggtccgacnnnnnnaaataataaactaaaaacgacgcaaccgatcggatacgcatgaggct

SEQ ID NO: 494 - DNA, 146 bp, Artificial Sequence
  Bisulfite Padlock Probe
  misc_feature 94, 95, 96, 97, 98, 99: n = A,T,C or G
gactggaagagcactgttaaaaatccgaacgcttaaaacgcttacgttggaggctcatcgttcctattcaggcagatgttatcgaggtccgacnnnnnnaaataataaactaaaaacgacgcgaccgatcggatacgcatgaggct

SEQ ID NO: 495 - DNA, 146 bp, Artificial Sequence
  Bisulfite Padlock Probe
  misc_feature 93, 94, 95, 96, 97, 98: n = A,T,C or G
gactggaagagcactgttaaaaatccgctaaaaacaaaactaatgttggaggctcatcgttcctattcaggcagatgttatcgaggtccgacnnnnnnaaccgcaacattctttacgccaaaaattgatcggatacgcatgaggct

SEQ ID NO: 496 - DNA, 146 bp, Artificial Sequence
  Bisulfite Padlock Probe
  misc_feature 92, 93, 94, 95, 96, 97: n = A,T,C or G
gactggaagagcactgttaaaaatccgctccaaccgctaacacgttggaggctcatcgttcctattcaggcagatgttatcgaggtccgacnnnnnnaacttcttacccacgtaaaacaaatccccgatcggatacgcatgaggct

SEQ ID NO: 497 - DNA, 146 bp, Artificial Sequence
  Bisulfite Padlock Probe
  misc_feature 92, 93, 94, 95, 96, 97: n = A,T,C or G
gactggaagagcactgttaaaaatccgctccaaccgctaacgcgttggaggctcatcgttcctattcaggcagatgttatcgaggtccgacnnnnnnaacttcttacccacgtaaaacgaatccccgatcggatacgcatgaggct

SEQ ID NO: 498 - DNA, 146 bp, Artificial Sequence
  Bisulfite Padlock Probe
  misc_feature 92, 93, 94, 95, 96, 97: n = A,T,C or G
gactggaagagcactgttaaaaatccttaacgccgcctcccaagttggaggctcatcgttcctattcaggcagatgttatcgaggtccgacnnnnnntctctataaaataatttcaatcttaacccgatcggatacgcatgaggct

SEQ ID NO: 499 - DNA, 146 bp, Artificial Sequence
  Bisulfite Padlock Probe
  misc_feature 92, 93, 94, 95, 96, 97: n = A,T,C or G
gactggaagagcactgttaaaaatccttaacgccgcctcccgagttggaggctcatcgttcctattcaggcagatgttatcgaggtccgacnnnnnntctctataaaataatttcaatcttaacccgatcggatacgcatgaggct

SEQ ID NO: 500 - DNA, 146 bp, Artificial Sequence
  Bisulfite Padlock Probe
  misc_feature 92, 93, 94, 95, 96, 97: n = A,T,C or G
gactggaagagcactgttaaaaatcctttcccaaccctaacaagttggaggctcatcgttcctattcaggcagatgttatcgaggtccgacnnnnnnccttctaaacaaaaccattcatcacaaaagatcggatacgcatgaggct

SEQ ID NO: 501 - DNA, 146 bp, Artificial Sequence
  Bisulfite Padlock Probe
  misc_feature 92, 93, 94, 95, 96, 97: n = A,T,C or G
gactggaagagcactgttaaaaatcctttcccgaccctaacaagttggaggctcatcgttcctattcaggcagatgttatcgaggtccgacnnnnnnccttctaaacaaaaccattcatcgcaaaagatcggatacgcatgaggct

SEQ ID NO: 502 - DNA, 146 bp, Artificial Sequence
  Bisulfite Padlock Probe
  misc_feature 94, 95, 96, 97, 98, 99: n = A,T,C or G
gactggaagagcactgttaaaaatcgaaaataacccaaataaaaagttggaggctcatcgttcctattcaggcagatgttatcgaggtccgacnnnnnnattaattccacaatctaaacaaaaacagatcggatacgcatgaggct

SEQ ID NO: 503 - DNA, 146 bp, Artificial Sequence
  Bisulfite Padlock Probe
  misc_feature 94, 95, 96, 97, 98, 99: n = A,T,C or G
gactggaagagcactgttaaaaatcgaaaataacccgaataaaaagttggaggctcatcgttcctattcaggcagatgttatcgaggtccgacnnnnnnattaattccacaatctaaacaaaaacggatcggatacgcatgaggct

SEQ ID NO: 504 - DNA, 146 bp, Artificial Sequence
  Bisulfite Padlock Probe
  misc_feature 95, 96, 97, 98, 99, 100: n = A,T,C or G
gactggaagagcactgttaaaaatcgaaacgaacaaataaaaacccgttggaggctcatcgttcctattcaggcagatgttatcgaggtccgacnnnnnnaaaaacgcctaacactaacaaaaatcgatcggatacgcatgaggct

SEQ ID NO: 505 - DNA, 146 bp, Artificial Sequence
  Bisulfite Padlock Probe
  misc_feature 95, 96, 97, 98, 99, 100: n = A,T,C or G
gactggaagagcactgttaaaaatcgaaacgaacgaataaaaacccgttggaggctcatcgttcctattcaggcagatgttatcgaggtccgacnnnnnnaaaaacgcctaacgctaacaaaaatcgatcggatacgcatgaggct

SEQ ID NO: 506 - DNA, 146 bp, Artificial Sequence
  Bisulfite Padlock Probe
  misc_feature 94, 95, 96, 97, 98, 99: n = A,T,C or G
gactggaagagcactgttaaaaatcgaacctaaacccctcaaaaagttggaggctcatcgttcctattcaggcagatgttatcgaggtccgacnnnnnnccaaaccccaaactaaaactccctatcgatcggatacgcatgaggct

SEQ ID NO: 507 - DNA, 146 bp, Artificial Sequence
  Bisulfite Padlock Probe
  misc_feature 94, 95, 96, 97, 98, 99: n = A,T,C or G
gactggaagagcactgttaaaaatcgaacgaatacgaacaaaaaagttggaggctcatcgttcctattcaggcagatgttatcgaggtccgacnnnnnnaaaaacgaccgcgtcgaaaacaaaaaagatcggatacgcatgaggct

SEQ ID NO: 508 - DNA, 146 bp, Artificial Sequence
  Bisulfite Padlock Probe
  misc_feature 94, 95, 96, 97, 98, 99: n = A,T,C or G
gactggaagagcactgttaaaaatcgaacgaatacgaacgaaaaagttggaggctcatcgttcctattcaggcagatgttatcgaggtccgacnnnnnnaaaaacgaccgcgtcgaaaacgaaaaagatcggatacgcatgaggct

SEQ ID NO: 509 - DNA, 146 bp, Artificial Sequence
  Bisulfite Padlock Probe
  misc_feature 96, 97, 98, 99, 100, 101: n = A,T,C or G
gactggaagagcactgttaaaaatcgacaaaaccctcaaactaatacgttggaggctcatcgttcctattcaggcagatgttatcgaggtccgacnnnnnnccgataacctcgaacgcaaccaacagatcggatacgcatgaggct

SEQ ID NO: 510 - DNA, 146 bp, Artificial Sequence
  Bisulfite Padlock Probe
  misc_feature 96, 97, 98, 99, 100, 101: n = A,T,C or G
gactggaagagcactgttaaaaatcgacgaaaccctcaaactaatacgttggaggctcatcgttcctattcaggcagatgttatcgaggtccgacnnnnnnccgataacctcgaacgcaaccaacggatcggatacgcatgaggct

SEQ ID NO: 511 - DNA, 146 bp, Artificial Sequence
  Bisulfite Padlock Probe
  misc_feature 92, 93, 94, 95, 96, 97: n = A,T,C or G
gactggaagagcactgttaaaaatcgatactataccgcgaacagttggaggctcatcgttcctattcaggcagatgttatcgaggtccgacnnnnnnaaaactttataaaacttcataaaaatctcgatcggatacgcatgaggct

SEQ ID NO: 512 - DNA, 146 bp, Artificial Sequence
  Bisulfite Padlock Probe
  misc_feature 92, 93, 94, 95, 96, 97: n = A,T,C or G
gactggaagagcactgttaaaaatcgatactataccgcgaacggttggaggctcatcgttcctattcaggcagatgttatcgaggtccgacnnnnnnaaaactttataaaacttcgtaaaaatctcgatcggatacgcatgaggct

SEQ ID NO: 513 - DNA, 146 bp, Artificial Sequence
  Bisulfite Padlock Probe
  misc_feature 92, 93, 94, 95, 96, 97: n = A,T,C or G
gactggaagagcactgttaaaaatcgcaacaaaacctacacctgttggaggctcatcgttcctattcaggcagatgttatcgaggtccgacnnnnnnttaaaaaccaataatacaaccaaaatcccgatcggatacgcatgaggct

SEQ ID NO: 514 - DNA, 146 bp, Artificial Sequence
  Bisulfite Padlock Probe
  misc_feature 92, 93, 94, 95, 96, 97: n = A,T,C or G
gactggaagagcactgttaaaaatcgcaacgaaacctacacctgttggaggctcatcgttcctattcaggcagatgttatcgaggtccgacnnnnnnttaaaaaccaataatacaaccgaaatcccgatcggatacgcatgaggct

SEQ ID NO: 515 - DNA, 146 bp, Artificial Sequence
  Bisulfite Padlock Probe
  misc_feature 95, 96, 97, 98, 99, 100: n = A,T,C or G
gactggaagagcactgttaaaaatctacgctaaataacaactcctcgttggaggctcatcgttcctattcaggcagatgttatcgaggtccgacnnnnnncaataaacctcaacaacaacaacaacgatcggatacgcatgaggct

SEQ ID NO: 516 - DNA, 146 bp, Artificial Sequence
  Bisulfite Padlock Probe
  misc_feature 95, 96, 97, 98, 99, 100: n = A,T,C or G
gactggaagagcactgttaaaaatctacgctaaataacgactcctcgttggaggctcatcgttcctattcaggcagatgttatcgaggtccgacnnnnnncaataaacctcaacaacaacaacaacgatcggatacgcatgaggct

SEQ ID NO: 517 - DNA, 146 bp, Artificial Sequence
  Bisulfite Padlock Probe
  misc_feature 92, 93, 94, 95, 96, 97: n = A,T,C or G
gactggaagagcactgttaaaaatctcccgaccaacttaatatgttggaggctcatcgttcctattcaggcagatgttatcgaggtccgacnnnnnncaaaactaacaaccaaactccaaacctccgatcggatacgcatgaggct

SEQ ID NO: 518 - DNA, 146 bp, Artificial Sequence
  Bisulfite Padlock Probe
  misc_feature 92, 93, 94, 95, 96, 97: n = A,T,C or G
gactggaagagcactgttaaaaatctcccgaccgacttaatatgttggaggctcatcgttcctattcaggcagatgttatcgaggtccgacnnnnnncaaaactaacgaccaaactccaaacctccgatcggatacgcatgaggct

SEQ ID NO: 519 - DNA, 146 bp, Artificial Sequence
  Bisulfite Padlock Probe
  misc_feature 93, 94, 95, 96, 97, 98: n = A,T,C or G
gactggaagagcactgttaaaaatctcctacaatttacctcatcgttggaggctcatcgttcctattcaggcagatgttatcgaggtccgacnnnnnnaccctaaaacgtaaaaataatcccaaaagatcggatacgcatgaggct

SEQ ID NO: 520 - DNA, 146 bp, Artificial Sequence
  Bisulfite Padlock Probe
  misc_feature 93, 94, 95, 96, 97, 98: n = A,T,C or G
gactggaagagcactgttaaaaatctcctacaatttacctcgtcgttggaggctcatcgttcctattcaggcagatgttatcgaggtccgacnnnnnnaccctaaaacgtaaaaataatcccgaaagatcggatacgcatgaggct

SEQ ID NO: 521 - DNA, 146 bp, Artificial Sequence
  Bisulfite Padlock Probe
  misc_feature 96, 97, 98, 99, 100, 101: n = A,T,C or G
gactggaagagcactgttaaaaattaaaaccgaaccctccacgacacgttggaggctcatcgttcctattcaggcagatgttatcgaggtccgacnnnnnngccacctcaaaaacaccctctactcgatcggatacgcatgaggct

SEQ ID NO: 522 - DNA, 146 bp, Artificial Sequence
  Bisulfite Padlock Probe
  misc_feature 96, 97, 98, 99, 100, 101: n = A,T,C or G
gactggaagagcactgttaaaaattaaaaccgaaccctccacgacgcgttggaggctcatcgttcctattcaggcagatgttatcgaggtccgacnnnnnngccacctcaaaaacgccctctactcgatcggatacgcatgaggct

SEQ ID NO: 523 - DNA, 146 bp, Artificial Sequence
  Bisulfite Padlock Probe
  misc_feature 96, 97, 98, 99, 100, 101: n = A,T,C or G
gactggaagagcactgttaaaaattacacactcccaccctctcccctgttggaggctcatcgttcctattcaggcagatgttatcgaggtccgacnnnnnnctcttcaaaaatccctactcctcccgatcggatacgcatgaggct

SEQ ID NO: 524 - DNA, 146 bp, Artificial Sequence
  Bisulfite Padlock Probe
  misc_feature 96, 97, 98, 99, 100, 101: n = A,T,C or G
gactggaagagcactgttaaaaattacacactcccaccctctcccctgttggaggctcatcgttcctattcaggcagatgttatcgaggtccgacnnnnnnctcttcgaaaatccctactcctcccgatcggatacgcatgaggct

SEQ ID NO: 525 - DNA, 146 bp, Artificial Sequence
  Bisulfite Padlock Probe
  misc_feature 92, 93, 94, 95, 96, 97: n = A,T,C or G
gactggaagagcactgttaaaaattactccataaactttcaacgttggaggctcatcgttcctattcaggcagatgttatcgaggtccgacnnnnnnaaaatcgatataaaataacaaacccatatgatcggatacgcatgaggct

SEQ ID NO: 526 - DNA, 146 bp, Artificial Sequence
  Bisulfite Padlock Probe
  misc_feature 92, 93, 94, 95, 96, 97: n = A,T,C or G
gactggaagagcactgttaaaaattactccgtaaactttcaacgttggaggctcatcgttcctattcaggcagatgttatcgaggtccgacnnnnnnaaaatcgatataaaataacgaacccatatgatcggatacgcatgaggct

SEQ ID NO: 527 - DNA, 146 bp, Artificial Sequence
  Bisulfite Padlock Probe
  misc_feature 92, 93, 94, 95, 96, 97: n = A,T,C or G
gactggaagagcactgttaaaaattatatatatatacgcgcacgttggaggctcatcgttcctattcaggcagatgttatcgaggtccgacnnnnnncttttctcctatctcttcttttatattctgatcggatacgcatgaggct

SEQ ID NO: 528 - DNA, 146 bp, Artificial Sequence
  Bisulfite Padlock Probe
  misc_feature 92, 93, 94, 95, 96, 97: n = A,T,C or G
gactggaagagcactgttaaaaattatatatatatacgcgcgcgttggaggctcatcgttcctattcaggcagatgttatcgaggtccgacnnnnnncttttctcctatctcttcttttatattctgatcggatacgcatgaggct

SEQ ID NO: 529 - DNA, 146 bp, Artificial Sequence
  Bisulfite Padlock Probe
  misc_feature 92, 93, 94, 95, 96, 97: n = A,T,C or G
gactggaagagcactgttaaaaattcaacgaccattcccatccgttggaggctcatcgttcctattcaggcagatgttatcgaggtccgacnnnnnncaacgcgaaacgaacaacatctaaacacagatcggatacgcatgaggct

SEQ ID NO: 530 - DNA, 146 bp, Artificial Sequence
  Bisulfite Padlock Probe
  misc_feature 92, 93, 94, 95, 96, 97: n = A,T,C or G
gactggaagagcactgttaaaaattcaacgaccattcccgtccgttggaggctcatcgttcctattcaggcagatgttatcgaggtccgacnnnnnncaacgcgaaacgaacaacgtctaaacacagatcggatacgcatgaggct

SEQ ID NO: 531 - DNA, 146 bp, Artificial Sequence
  Bisulfite Padlock Probe
  misc_feature 92, 93, 94, 95, 96, 97: n = A,T,C or G
gactggaagagcactgttaaaaattcaattacctccgccgccagttggaggctcatcgttcctattcaggcagatgttatcgaggtccgacnnnnnnccttaaaaatcaaaaacaaataataacttgatcggatacgcatgaggct

SEQ ID NO: 532 - DNA, 146 bp, Artificial Sequence
  Bisulfite Padlock Probe
  misc_feature 92, 93, 94, 95, 96, 97: n = A,T,C or G
gactggaagagcactgttaaaaattcaattacctccgccgccggttggaggctcatcgttcctattcaggcagatgttatcgaggtccgacnnnnnnccttaaaaatcgaaaacaaataataacttgatcggatacgcatgaggct

SEQ ID NO: 533 - DNA, 146 bp, Artificial Sequence
  Bisulfite Padlock Probe
  misc_feature 92, 93, 94, 95, 96, 97: n = A,T,C or G
gactggaagagcactgttaaaaattcacccccaaaattcccaagttggaggctcatcgttcctattcaggcagatgttatcgaggtccgacnnnnnngcaacaacctaccctattcccaaaccaaagatcggatacgcatgaggct

SEQ ID NO: 534 - DNA, 146 bp, Artificial Sequence
  Bisulfite Padlock Probe
  misc_feature 92, 93, 94, 95, 96, 97: n = A,T,C or G
gactggaagagcactgttaaaaattcacccccgaaattcccaagttggaggctcatcgttcctattcaggcagatgttatcgaggtccgacnnnnnngcaacgacctaccctattcccaaaccaaagatcggatacgcatgaggct

SEQ ID NO: 535 - DNA, 146 bp, Artificial Sequence
  Bisulfite Padlock Probe
  misc_feature 92, 93, 94, 95, 96, 97: n = A,T,C or G
gactggaagagcactgttaaaaattcataaacaattaaattccgttggaggctcatcgttcctattcaggcagatgttatcgaggtccgacnnnnnnaataacgaaataatatatcccaataaaaagatcggatacgcatgaggct

SEQ ID NO: 536 - DNA, 146 bp, Artificial Sequence
  Bisulfite Padlock Probe
  misc_feature 92, 93, 94, 95, 96, 97: n = A,T,C or G
gactggaagagcactgttaaaaattcataaacaattaaattccgttggaggctcatcgttcctattcaggcagatgttatcgaggtccgacnnnnnnaataacgaaataatatatcccgataaaaagatcggatacgcatgaggct

SEQ ID NO: 537 - DNA, 146 bp, Artificial Sequence
  Bisulfite Padlock Probe
  misc_feature 96, 97, 98, 99, 100, 101: n = A,T,C or G
gactggaagagcactgttaaaaattcccaaacttcccttcctaaaaagttggaggctcatcgttcctattcaggcagatgttatcgaggtccgacnnnnnnacctacaaacgacccaaccgcatacgatcggatacgcatgaggct

SEQ ID NO: 538 - DNA, 146 bp, Artificial Sequence
  Bisulfite Padlock Probe
  misc_feature 96, 97, 98, 99, 100, 101: n = A,T,C or G
gactggaagagcactgttaaaaattcccgaacttcccttcctaaaaagttggaggctcatcgttcctattcaggcagatgttatcgaggtccgacnnnnnnacctacaaacgacccaaccgcgtacgatcggatacgcatgaggct

SEQ ID NO: 539 - DNA, 146 bp, Artificial Sequence
  Bisulfite Padlock Probe
  misc_feature 94, 95, 96, 97, 98, 99: n = A,T,C or G
gactggaagagcactgttaaaaattcctcctcccctaaccaaaaagttggaggctcatcgttcctattcaggcagatgttatcgaggtccgacnnnnnnacaaacctacctaaaccaccccaaaaagatcggatacgcatgaggct

SEQ ID NO: 540 - DNA, 146 bp, Artificial Sequence
  Bisulfite Padlock Probe
  misc_feature 94, 95, 96, 97, 98, 99: n = A,T,C or G
gactggaagagcactgttaaaaattcctcctcccctaaccgaaaagttggaggctcatcgttcctattcaggcagatgttatcgaggtccgacnnnnnnacaaacctacctaaaccgccccaaaaagatcggatacgcatgaggct

SEQ ID NO: 541 - DNA, 146 bp, Artificial Sequence
  Bisulfite Padlock Probe
  misc_feature 94, 95, 96, 97, 98, 99: n = A,T,C or G
gactggaagagcactgttaaaaattcgtacttcaaaacacaaaccgttggaggctcatcgttcctattcaggcagatgttatcgaggtccgacnnnnnncacaatcctcttccccctccccaactagatcggatacgcatgaggct

SEQ ID NO: 542 - DNA, 146 bp, Artificial Sequence
  Bisulfite Padlock Probe
  misc_feature 94, 95, 96, 97, 98, 99: n = A,T,C or G
gactggaagagcactgttaaaaattcgtacttcaaaacgcaaaccgttggaggctcatcgttcctattcaggcagatgttatcgaggtccgacnnnnnncacaatcctcttccccctccccaactagatcggatacgcatgaggct

SEQ ID NO: 543 - DNA, 146 bp, Artificial Sequence
  Bisulfite Padlock Probe
  misc_feature 93, 94, 95, 96, 97, 98: n = A,T,C or G
gactggaagagcactgttaaaaatttaacttaaactcattaaacgttggaggctcatcgttcctattcaggcagatgttatcgaggtccgacnnnnnnctaaaaacactatctaccataacctcccgatcggatacgcatgaggct

SEQ ID NO: 544 - DNA, 146 bp, Artificial Sequence
  Bisulfite Padlock Probe
  misc_feature 93, 94, 95, 96, 97, 98: n = A,T,C or G
gactggaagagcactgttaaaaatttaacttaaactcgttaaacgttggaggctcatcgttcctattcaggcagatgttatcgaggtccgacnnnnnnctaaaaacactatctaccgtaacctcccgatcggatacgcatgaggct

SEQ ID NO: 545 - DNA, 146 bp, Artificial Sequence
  Bisulfite Padlock Probe
  misc_feature 92, 93, 94, 95, 96, 97: n = A,T,C or G
gactggaagagcactgttaaaaatttaacttacaactaaccccgttggaggctcatcgttcctattcaggcagatgttatcgaggtccgacnnnnnnataacgctaaaaccctaaaacactataacgatcggatacgcatgaggct

SEQ ID NO: 546 - DNA, 146 bp, Artificial Sequence
  Bisulfite Padlock Probe
  misc_feature 92, 93, 94, 95, 96, 97: n = A,T,C or G
gactggaagagcactgttaaaaatttaacttacgactaaccccgttggaggctcatcgttcctattcaggcagatgttatcgaggtccgacnnnnnnataacgctaaaaccctaaaacgctataacgatcggatacgcatgaggct

SEQ ID NO: 547 - DNA, 146 bp, Artificial Sequence
  Bisulfite Padlock Probe
  misc_feature 96, 97, 98, 99, 100, 101: n = A,T,C or G
gactggaagagcactgttaaaaatttaatctcgatacgcaaccctccgttggaggctcatcgttcctattcaggcagatgttatcgaggtccgacnnnnnnaaaaacgctaaaccgaaccgcctcagatcggatacgcatgaggct

SEQ ID NO: 548 - DNA, 146 bp, Artificial Sequence
  Bisulfite Padlock Probe
  misc_feature 96, 97, 98, 99, 100, 101: n = A,T,C or G
gactggaagagcactgttaaaaatttaatctcgatacgcgaccctccgttggaggctcatcgttcctattcaggcagatgttatcgaggtccgacnnnnnnaaaaacgctaaaccgaaccgcctcggatcggatacgcatgaggct

SEQ ID NO: 549 - DNA, 146 bp, Artificial Sequence
  Bisulfite Padlock Probe
  misc_feature 93, 94, 95, 96, 97, 98: n = A,T,C or G
gactggaagagcactgttaaaaatttatacatacttctttacccgttggaggctcatcgttcctattcaggcagatgttatcgaggtccgacnnnnnngaaattccttaaccacaaacaaaacctcgatcggatacgcatgaggct

SEQ ID NO: 550 - DNA, 146 bp, Artificial Sequence
  Bisulfite Padlock Probe
  misc_feature 93, 94, 95, 96, 97, 98: n = A,T,C or G
gactggaagagcactgttaaaaatttatacgtacttctttacccgttggaggctcatcgttcctattcaggcagatgttatcgaggtccgacnnnnnngaaattccttaaccacaaacgaaacctcgatcggatacgcatgaggct

SEQ ID NO: 551 - DNA, 146 bp, Artificial Sequence
  Bisulfite Padlock Probe
  misc_feature 96, 97, 98, 99, 100, 101: n = A,T,C or G
gactggaagagcactgttaaaaatttccacaccaacatctaatactcgttggaggctcatcgttcctattcaggcagatgttatcgaggtccgacnnnnnnaatccccaaaccgaactacaaccaagatcggatacgcatgaggct

SEQ ID NO: 552 - DNA, 146 bp, Artificial Sequence
  Bisulfite Padlock Probe
  misc_feature 96, 97, 98, 99, 100, 101: n = A,T,C or G
gactggaagagcactgttaaaaatttccacaccgacatctaatactcgttggaggctcatcgttcctattcaggcagatgttatcgaggtccgacnnnnnnaatccccaaaccgaactacgaccaagatcggatacgcatgaggct

SEQ ID NO: 553 - DNA, 146 bp, Artificial Sequence
  Bisulfite Padlock Probe
  misc_feature 95, 96, 97, 98, 99, 100: n = A,T,C or G
gactggaagagcactgttaaaaatttccgcgcgtactcaacgttcagttggaggctcatcgttcctattcaggcagatgttatcgaggtccgacnnnnnngacttcgaaaacgaccgaacccaaacgatcggatacgcatgaggct

SEQ ID NO: 554 - DNA, 146 bp, Artificial Sequence
  Bisulfite Padlock Probe
  misc_feature 95, 96, 97, 98, 99, 100: n = A,T,C or G
gactggaagagcactgttaaaaatttccgcgcgtactcaacgttcggttggaggctcatcgttcctattcaggcagatgttatcgaggtccgacnnnnnngacttcgaaaacgaccgaacccgaacgatcggatacgcatgaggct

SEQ ID NO: 555 - DNA, 146 bp, Artificial Sequence
  Bisulfite Padlock Probe
  misc_feature 92, 93, 94, 95, 96, 97: n = A,T,C or G
gactggaagagcactgttaaaaatttctacttcttattctaacgttggaggctcatcgttcctattcaggcagatgttatcgaggtccgacnnnnnnacctataaatctaactactataaaaacccgatcggatacgcatgaggct

SEQ ID NO: 556 - DNA, 146 bp, Artificial Sequence
  Bisulfite Padlock Probe
  misc_feature 94, 95, 96, 97, 98, 99: n = A,T,C or G
gactggaagagcactgttaaaacaaaaaccctacaattaaacacagttggaggctcatcgttcctattcaggcagatgttatcgaggtccgacnnnnnnaaaaatacaaatacaaaactccaaaaagatcggatacgcatgaggct

SEQ ID NO: 557 - DNA, 146 bp, Artificial Sequence
  Bisulfite Padlock Probe
  misc_feature 92, 93, 94, 95, 96, 97: n = A,T,C or G
gactggaagagcactgttaaaacaaaaactaaatttacaaaaagttggaggctcatcgttcctattcaggcagatgttatcgaggtccgacnnnnnnaaaaacatttaaatatacatcaaatcaaagatcggatacgcatgaggct

SEQ ID NO: 558 - DNA, 146 bp, Artificial Sequence
  Bisulfite Padlock Probe
  misc_feature 92, 93, 94, 95, 96, 97: n = A,T,C or G
gactggaagagcactgttaaaacaaaacaacccccaaaaatacgttggaggctcatcgttcctattcaggcagatgttatcgaggtccgacnnnnnnaaactaaacaaaaacctcccctaaaaccagatcggatacgcatgaggct

SEQ ID NO: 559 - DNA, 146 bp, Artificial Sequence
  Bisulfite Padlock Probe
  misc_feature 92, 93, 94, 95, 96, 97: n = A,T,C or G
gactggaagagcactgttaaaacaaaacgacccccaaaaatacgttggaggctcatcgttcctattcaggcagatgttatcgaggtccgacnnnnnnaaactaaacgaaaacctcccctaaaaccagatcggatacgcatgaggct

SEQ ID NO: 560 - DNA, 146 bp, Artificial Sequence
  Bisulfite Padlock Probe
  misc_feature 92, 93, 94, 95, 96, 97: n = A,T,C or G
gactggaagagcactgttaaaacaaaactaaaaatacaaattcgttggaggctcatcgttcctattcaggcagatgttatcgaggtccgacnnnnnnacctctcttcacttcccacctcaataaccgatcggatacgcatgaggct

SEQ ID NO: 561 - DNA, 146 bp, Artificial Sequence
  Bisulfite Padlock Probe
  misc_feature 92, 93, 94, 95, 96, 97: n = A,T,C or G
gactggaagagcactgttaaaacaaacacaaacaaaacaacccgttggaggctcatcgttcctattcaggcagatgttatcgaggtccgacnnnnnncttccaactctctccacaaaataaacatagatcggatacgcatgaggct

SEQ ID NO: 562 - DNA, 146 bp, Artificial Sequence
  Bisulfite Padlock Probe
  misc_feature 92, 93, 94, 95, 96, 97: n = A,T,C or G
gactggaagagcactgttaaaacaaacacatctatacacacacgttggaggctcatcgttcctattcaggcagatgttatcgaggtccgacnnnnnntacccgaatatatacacccaaaaaataaagatcggatacgcatgaggct

SEQ ID NO: 563 - DNA, 146 bp, Artificial Sequence
  Bisulfite Padlock Probe
  misc_feature 92, 93, 94, 95, 96, 97: n = A,T,C or G
gactggaagagcactgttaaaacaaacgaaaatacaaaaaaccgttggaggctcatcgttcctattcaggcagatgttatcgaggtccgacnnnnnntacgaaactacccgataatcccaatacccgatcggatacgcatgaggct

SEQ ID NO: 564 - DNA, 146 bp, Artificial Sequence
  Bisulfite Padlock Probe
  misc_feature 92, 93, 94, 95, 96, 97: n = A,T,C or G
gactggaagagcactgttaaaacaaacgaaaatacgaaaaaccgttggaggctcatcgttcctattcaggcagatgttatcgaggtccgacnnnnnntacgaaactacccgataatcccgatacccgatcggatacgcatgaggct

SEQ ID NO: 565 - DNA, 146 bp, Artificial Sequence
  Bisulfite Padlock Probe
  misc_feature 92, 93, 94, 95, 96, 97: n = A,T,C or G
gactggaagagcactgttaaaacaaacgcaaacaaaacaacccgttggaggctcatcgttcctattcaggcagatgttatcgaggtccgacnnnnnncttccaactctctccacgaaataaacatagatcggatacgcatgaggct

SEQ ID NO: 566 - DNA, 146 bp, Artificial Sequence
  Bisulfite Padlock Probe
  misc_feature 92, 93, 94, 95, 96, 97: n = A,T,C or G
gactggaagagcactgttaaaacaaacgcatctatacacacacgttggaggctcatcgttcctattcaggcagatgttatcgaggtccgacnnnnnntacccgaatatatacacccgaaaaataaagatcggatacgcatgaggct

SEQ ID NO: 567 - DNA, 146 bp, Artificial Sequence
  Bisulfite Padlock Probe
  misc_feature 92, 93, 94, 95, 96, 97: n = A,T,C or G
gactggaagagcactgttaaaacaaactacccacaactaaaacgttggaggctcatcgttcctattcaggcagatgttatcgaggtccgacnnnnnncctaaacccctaaaaactaaacatcaaccgatcggatacgcatgaggct

SEQ ID NO: 568 - DNA, 146 bp, Artificial Sequence
  Bisulfite Padlock Probe
  misc_feature 92, 93, 94, 95, 96, 97: n = A,T,C or G
gactggaagagcactgttaaaacaaactacccacgactaaaacgttggaggctcatcgttcctattcaggcagatgttatcgaggtccgacnnnnnncctaaacccctaaaaactaaacgtcaaccgatcggatacgcatgaggct

SEQ ID NO: 569 - DNA, 146 bp, Artificial Sequence
  Bisulfite Padlock Probe
  misc_feature 95, 96, 97, 98, 99, 100: n = A,T,C or G
gactggaagagcactgttaaaacaaatatatatccccgctcactccgttggaggctcatcgttcctattcaggcagatgttatcgaggtccgacnnnnnngaactcctccactcccacttctcctagatcggatacgcatgaggct

SEQ ID NO: 570 - DNA, 146 bp, Artificial Sequence
  Bisulfite Padlock Probe
  misc_feature 95, 96, 97, 98, 99, 100: n = A,T,C or G
gactggaagagcactgttaaaacaaatatatatccccgctcgctccgttggaggctcatcgttcctattcaggcagatgttatcgaggtccgacnnnnnngaactcctccactcccgcttctcctagatcggatacgcatgaggct

SEQ ID NO: 571 - DNA, 146 bp, Artificial Sequence
  Bisulfite Padlock Probe
  misc_feature 94, 95, 96, 97, 98, 99: n = A,T,C or G
gactggaagagcactgttaaaacaacaaaaccgcataatcaaatagttggaggctcatcgttcctattcaggcagatgttatcgaggtccgacnnnnnncgcgaaaacgtactacacctaaaacccgatcggatacgcatgaggct

SEQ ID NO: 572 - DNA, 146 bp, Artificial Sequence
  Bisulfite Padlock Probe
  misc_feature 94, 95, 96, 97, 98, 99: n = A,T,C or G
gactggaagagcactgttaaaacaacaaaaccgcgtaatcaaatagttggaggctcatcgttcctattcaggcagatgttatcgaggtccgacnnnnnncgcgaaaacgtactacgcctaaaacccgatcggatacgcatgaggct

SEQ ID NO: 573 - DNA, 146 bp, Artificial Sequence
  Bisulfite Padlock Probe
  misc_feature 92, 93, 94, 95, 96, 97: n = A,T,C or G
gactggaagagcactgttaaaacaacgaaaaaccaaaatccacgttggaggctcatcgttcctattcaggcagatgttatcgaggtccgacnnnnnnactacgaaaaccccttaacaactaatacagatcggatacgcatgaggct

SEQ ID NO: 574 - DNA, 146 bp, Artificial Sequence
  Bisulfite Padlock Probe
  misc_feature 92, 93, 94, 95, 96, 97: n = A,T,C or G
gactggaagagcactgttaaaacaacgaaaaaccaaaatccgcgttggaggctcatcgttcctattcaggcagatgttatcgaggtccgacnnnnnnactacgaaaaccccttaacgactaatacagatcggatacgcatgaggct

SEQ ID NO: 575 - DNA, 146 bp, Artificial Sequence
  Bisulfite Padlock Probe
  misc_feature 92, 93, 94, 95, 96, 97: n = A,T,C or G
gactggaagagcactgttaaaacaacgaccccaaacctaactcgttggaggctcatcgttcctattcaggcagatgttatcgaggtccgacnnnnnntaccttctaaaattaataatcataaattcgatcggatacgcatgaggct

SEQ ID NO: 576 - DNA, 146 bp, Artificial Sequence
  Bisulfite Padlock Probe
  misc_feature 92, 93, 94, 95, 96, 97: n = A,T,C or G
gactggaagagcactgttaaaacaacgaccccgaacctaactcgttggaggctcatcgttcctattcaggcagatgttatcgaggtccgacnnnnnntaccttctaaaattaataatcataaattcgatcggatacgcatgaggct

SEQ ID NO: 577 - DNA, 146 bp, Artificial Sequence
  Bisulfite Padlock Probe
  misc_feature 94, 95, 96, 97, 98, 99: n = A,T,C or G
gactggaagagcactgttaaaacaactactaaaaccctacccaacgttggaggctcatcgttcctattcaggcagatgttatcgaggtccgacnnnnnnaaccgcctacaccttacaacaaaaatcgatcggatacgcatgaggct

SEQ ID NO: 578 - DNA, 146 bp, Artificial Sequence
  Bisulfite Padlock Probe
  misc_feature 94, 95, 96, 97, 98, 99: n = A,T,C or G
gactggaagagcactgttaaaacaactactaaaaccctacccaacgttggaggctcatcgttcctattcaggcagatgttatcgaggtccgacnnnnnnaaccgcctacaccttacgacaaaaatcgatcggatacgcatgaggct

SEQ ID NO: 579 - DNA, 146 bp, Artificial Sequence
  Bisulfite Padlock Probe
  misc_feature 93, 94, 95, 96, 97, 98: n = A,T,C or G
gactggaagagcactgttaaaacaactcgcgctcaaccaacaacgttggaggctcatcgttcctattcaggcagatgttatcgaggtccgacnnnnnnaaaaactcgaatcccgaactaccactacgatcggatacgcatgaggct

SEQ ID NO: 580 - DNA, 146 bp, Artificial Sequence
  Bisulfite Padlock Probe
  misc_feature 93, 94, 95, 96, 97, 98: n = A,T,C or G
gactggaagagcactgttaaaacaactcgcgctcaaccaacgacgttggaggctcatcgttcctattcaggcagatgttatcgaggtccgacnnnnnnaaaaactcgaatcccgaactaccgctacgatcggatacgcatgaggct

SEQ ID NO: 581 - DNA, 146 bp, Artificial Sequence
  Bisulfite Padlock Probe
  misc_feature 96, 97, 98, 99, 100, 101: n = A,T,C or G
gactggaagagcactgttaaaacaataaacgccaaaaaccccctaacgttggaggctcatcgttcctattcaggcagatgttatcgaggtccgacnnnnnnaacttcctccgaaactactaaccacgatcggatacgcatgaggct

SEQ ID NO: 582 - DNA, 146 bp, Artificial Sequence
  Bisulfite Padlock Probe
  misc_feature 96, 97, 98, 99, 100, 101: n = A,T,C or G
gactggaagagcactgttaaaacaataaacgccgaaaaccccctaacgttggaggctcatcgttcctattcaggcagatgttatcgaggtccgacnnnnnnaacttcctccgaaactactaaccgcgatcggatacgcatgaggct

SEQ ID NO: 583 - DNA, 146 bp, Artificial Sequence
  Bisulfite Padlock Probe
  misc_feature 92, 93, 94, 95, 96, 97: n = A,T,C or G
gactggaagagcactgttaaaacaatcccccatattcataatagttggaggctcatcgttcctattcaggcagatgttatcgaggtccgacnnnnnncaaaacaaaaccccaaataacacttactagatcggatacgcatgaggct

SEQ ID NO: 584 - DNA, 146 bp, Artificial Sequence
  Bisulfite Padlock Probe
  misc_feature 93, 94, 95, 96, 97, 98: n = A,T,C or G
gactggaagagcactgttaaaacaccccctaaacaaataaacacgttggaggctcatcgttcctattcaggcagatgttatcgaggtccgacnnnnnnaaaaccgcaatacgaccgacactaaaacgatcggatacgcatgaggct

SEQ ID NO: 585 - DNA, 146 bp, Artificial Sequence
  Bisulfite Padlock Probe
  misc_feature 93, 94, 95, 96, 97, 98: n = A,T,C or G
gactggaagagcactgttaaaacaccgaactacaacaacacaacgttggaggctcatcgttcctattcaggcagatgttatcgaggtccgacnnnnnnaaatccgtataaatccgacccataaaaagatcggatacgcatgaggct

SEQ ID NO: 586 - DNA, 146 bp, Artificial Sequence
  Bisulfite Padlock Probe
  misc_feature 93, 94, 95, 96, 97, 98: n = A,T,C or G
gactggaagagcactgttaaaacaccgaactacaacgacacaacgttggaggctcatcgttcctattcaggcagatgttatcgaggtccgacnnnnnnaaatccgtataaatccgacccgtaaaaagatcggatacgcatgaggct

SEQ ID NO: 587 - DNA, 146 bp, Artificial Sequence
  Bisulfite Padlock Probe
  misc_feature 96, 97, 98, 99, 100, 101: n = A,T,C or G
gactggaagagcactgttaaaacacctcccatccaactatctaaaaagttggaggctcatcgttcctattcaggcagatgttatcgaggtccgacnnnnnncctctcgaactaactcgacaacaccgatcggatacgcatgaggct

SEQ ID NO: 588 - DNA, 146 bp, Artificial Sequence
  Bisulfite Padlock Probe
  misc_feature 96, 97, 98, 99, 100, 101: n = A,T,C or G
gactggaagagcactgttaaaacacctcccgtccaactatctaaaaagttggaggctcatcgttcctattcaggcagatgttatcgaggtccgacnnnnnncctctcgaactaactcgacgacaccgatcggatacgcatgaggct

SEQ ID NO: 589 - DNA, 146 bp, Artificial Sequence
  Bisulfite Padlock Probe
  misc_feature 92, 93, 94, 95, 96, 97: n = A,T,C or G
gactggaagagcactgttaaaacacgcgcaaaataaacgcaacgttggaggctcatcgttcctattcaggcagatgttatcgaggtccgacnnnnnntccctctaaccgacaacaaacaaataatcgatcggatacgcatgaggct

SEQ ID NO: 590 - DNA, 146 bp, Artificial Sequence
  Bisulfite Padlock Probe
  misc_feature 92, 93, 94, 95, 96, 97: n = A,T,C or G
gactggaagagcactgttaaaacacgcgcaaaataaacgcgacgttggaggctcatcgttcctattcaggcagatgttatcgaggtccgacnnnnnntccctctaaccgacaacgaacaaataatcgatcggatacgcatgaggct

SEQ ID NO: 591 - DNA, 146 bp, Artificial Sequence
  Bisulfite Padlock Probe
  misc_feature 93, 94, 95, 96, 97, 98: n = A,T,C or G
gactggaagagcactgttaaaacacgtaaccacctctaaaacaagttggaggctcatcgttcctattcaggcagatgttatcgaggtccgacnnnnnncaaactccccgaaaaacgcaaaacaattgatcggatacgcatgaggct

SEQ ID NO: 592 - DNA, 146 bp, Artificial Sequence
  Bisulfite Padlock Probe
  misc_feature 93, 94, 95, 96, 97, 98: n = A,T,C or G
gactggaagagcactgttaaaacacgtaaccgcctctaaaacaagttggaggctcatcgttcctattcaggcagatgttatcgaggtccgacnnnnnncaaactccccgaaaaacgcaaaacgattgatcggatacgcatgaggct

SEQ ID NO: 593 - DNA, 146 bp, Artificial Sequence
  Bisulfite Padlock Probe
  misc_feature 93, 94, 95, 96, 97, 98: n = A,T,C or G
gactggaagagcactgttaaaacactaacaacgacgacgcactcgttggaggctcatcgttcctattcaggcagatgttatcgaggtccgacnnnnnncaaatacgaccctaacaaacaaaacctcgatcggatacgcatgaggct

SEQ ID NO: 594 - DNA, 146 bp, Artificial Sequence
  Bisulfite Padlock Probe
  misc_feature 93, 94, 95, 96, 97, 98: n = A,T,C or G
gactggaagagcactgttaaaacactaacaacgacgacgcgctcgttggaggctcatcgttcctattcaggcagatgttatcgaggtccgacnnnnnncaaatacgaccctaacgaacaaaacctcgatcggatacgcatgaggct

SEQ ID NO: 595 - DNA, 146 bp, Artificial Sequence
  Bisulfite Padlock Probe
  misc_feature 92, 93, 94, 95, 96, 97: n = A,T,C or G
gactggaagagcactgttaaaacactcacaaattatataaaaagttggaggctcatcgttcctattcaggcagatgttatcgaggtccgacnnnnnnatacctttacccaacacctaacaatactagatcggatacgcatgaggct

SEQ ID NO: 596 - DNA, 146 bp, Artificial Sequence
  Bisulfite Padlock Probe
  misc_feature 92, 93, 94, 95, 96, 97: n = A,T,C or G
gactggaagagcactgttaaaacactcacaaattatataaaaagttggaggctcatcgttcctattcaggcagatgttatcgaggtccgacnnnnnnatacctttacccaacacctaacgatactagatcggatacgcatgaggct

SEQ ID NO: 597 - DNA, 146 bp, Artificial Sequence
  Bisulfite Padlock Probe
  misc_feature 96, 97, 98, 99, 100, 101: n = A,T,C or G
gactggaagagcactgttaaaacataaacaaacttaatatccaaaaagttggaggctcatcgttcctattcaggcagatgttatcgaggtccgacnnnnnnaaaaaccgaaaccgccgacaaaaccgatcggatacgcatgaggct

SEQ ID NO: 598 - DNA, 146 bp, Artificial Sequence
  Bisulfite Padlock Probe
  misc_feature 94, 95, 96, 97, 98, 99: n = A,T,C or G
gactggaagagcactgttaaaacataaccaaaacccaaaaaccccgttggaggctcatcgttcctattcaggcagatgttatcgaggtccgacnnnnnnaaacccactctcactaactctccctccgatcggatacgcatgaggct

SEQ ID NO: 599 - DNA, 146 bp, Artificial Sequence
  Bisulfite Padlock Probe
  misc_feature 92, 93, 94, 95, 96, 97: n = A,T,C or G
gactggaagagcactgttaaaacatcccacaatctattaaaacgttggaggctcatcgttcctattcaggcagatgttatcgaggtccgacnnnnnncctccacaaataaataattaaattaaaaagatcggatacgcatgaggct

SEQ ID NO: 600 - DNA, 146 bp, Artificial Sequence
  Bisulfite Padlock Probe
  misc_feature 92, 93, 94, 95, 96, 97: n = A,T,C or G
gactggaagagcactgttaaaacatcccgcaatctattaaaacgttggaggctcatcgttcctattcaggcagatgttatcgaggtccgacnnnnnncctccacaaataaataattaaattaaaaagatcggatacgcatgaggct

SEQ ID NO: 601 - DNA, 146 bp, Artificial Sequence
  Bisulfite Padlock Probe
  misc_feature 94, 95, 96, 97, 98, 99: n = A,T,C or G
gactggaagagcactgttaaaacatttaaatcgccccctcaaaacgttggaggctcatcgttcctattcaggcagatgttatcgaggtccgacnnnnnnaaaaataaaaccgaatctaactaaacagatcggatacgcatgaggct

SEQ ID NO: 602 - DNA, 146 bp, Artificial Sequence
  Bisulfite Padlock Probe
  misc_feature 94, 95, 96, 97, 98, 99: n = A,T,C or G
gactggaagagcactgttaaaacatttaaatcgccccctcgaaacgttggaggctcatcgttcctattcaggcagatgttatcgaggtccgacnnnnnnaaaaataaaaccgaatctaactaaacggatcggatacgcatgaggct

SEQ ID NO: 603 - DNA, 146 bp, Artificial Sequence
  Bisulfite Padlock Probe
  misc_feature 94, 95, 96, 97, 98, 99: n = A,T,C or G
gactggaagagcactgttaaaaccaaaacaaaaactcaaaactacgttggaggctcatcgttcctattcaggcagatgttatcgaggtccgacnnnnnnaacccctccaactactaaataaaactagatcggatacgcatgaggct

SEQ ID NO: 604 - DNA, 146 bp, Artificial Sequence
  Bisulfite Padlock Probe
  misc_feature 94, 95, 96, 97, 98, 99: n = A,T,C or G
gactggaagagcactgttaaaaccaaaacaaaaactcgaaactacgttggaggctcatcgttcctattcaggcagatgttatcgaggtccgacnnnnnnaacccctccgactactaaataaaactagatcggatacgcatgaggct

SEQ ID NO: 605 - DNA, 146 bp, Artificial Sequence
  Bisulfite Padlock Probe
  misc_feature 95, 96, 97, 98, 99, 100: n = A,T,C or G
gactggaagagcactgttaaaaccaaaaccaaacatcaaaacctcagttggaggctcatcgttcctattcaggcagatgttatcgaggtccgacnnnnnnaacccgaaataaaacgacgacacaccgatcggatacgcatgaggct

SEQ ID NO: 606 - DNA, 146 bp, Artificial Sequence
  Bisulfite Padlock Probe
  misc_feature 95, 96, 97, 98, 99, 100: n = A,T,C or G
gactggaagagcactgttaaaaccaaaaccgaacatcaaaacctcagttggaggctcatcgttcctattcaggcagatgttatcgaggtccgacnnnnnnaacccgaaataaaacgacgacgcaccgatcggatacgcatgaggct

SEQ ID NO: 607 - DNA, 146 bp, Artificial Sequence
  Bisulfite Padlock Probe
  misc_feature 92, 93, 94, 95, 96, 97: n = A,T,C or G
gactggaagagcactgttaaaaccaaactactcaacctacaacgttggaggctcatcgttcctattcaggcagatgttatcgaggtccgacnnnnnncaaccataatccacccaatactcttactcgatcggatacgcatgaggct

SEQ ID NO: 608 - DNA, 146 bp, Artificial Sequence
  Bisulfite Padlock Probe
  misc_feature 92, 93, 94, 95, 96, 97: n = A,T,C or G
gactggaagagcactgttaaaaccaaactactcaacctacaacgttggaggctcatcgttcctattcaggcagatgttatcgaggtccgacnnnnnncaaccataatccgcccaatactcttactcgatcggatacgcatgaggct

SEQ ID NO: 609 - DNA, 146 bp, Artificial Sequence
  Bisulfite Padlock Probe
  misc_feature 93, 94, 95, 96, 97, 98: n = A,T,C or G
gactggaagagcactgttaaaaccaaatccgacgaaaacgcaacgttggaggctcatcgttcctattcaggcagatgttatcgaggtccgacnnnnnncccccaactctcaaataaactacaaaacgatcggatacgcatgaggct

SEQ ID NO: 610 - DNA, 146 bp, Artificial Sequence
  Bisulfite Padlock Probe
  misc_feature 93, 94, 95, 96, 97, 98: n = A,T,C or G
gactggaagagcactgttaaaaccaaatccgacgaaaacgcgacgttggaggctcatcgttcctattcaggcagatgttatcgaggtccgacnnnnnncccccaactctcgaataaactacaaaacgatcggatacgcatgaggct

SEQ ID NO: 611 - DNA, 146 bp, Artificial Sequence
  Bisulfite Padlock Probe
  misc_feature 92, 93, 94, 95, 96, 97: n = A,T,C or G
gactggaagagcactgttaaaaccaaccaacctaccctaaatagttggaggctcatcgttcctattcaggcagatgttatcgaggtccgacnnnnnnaataccctatcaaacaaaaactctaaaaagatcggatacgcatgaggct

SEQ ID NO: 612 - DNA, 146 bp, Artificial Sequence
  Bisulfite Padlock Probe
  misc_feature 93, 94, 95, 96, 97, 98: n = A,T,C or G
gactggaagagcactgttaaaaccaacccctactaaaaccaaacgttggaggctcatcgttcctattcaggcagatgttatcgaggtccgacnnnnnncctatttcgccatcgtacgcaacaaaaagatcggatacgcatgaggct

SEQ ID NO: 613 - DNA, 146 bp, Artificial Sequence
  Bisulfite Padlock Probe
  misc_feature 93, 94, 95, 96, 97, 98: n = A,T,C or G
gactggaagagcactgttaaaaccaacccctactaaaaccaaacgttggaggctcatcgttcctattcaggcagatgttatcgaggtccgacnnnnnncctatttcgccatcgtacgcgacaaaaagatcggatacgcatgaggct

SEQ ID NO: 614 - DNA, 146 bp, Artificial Sequence
  Bisulfite Padlock Probe
  misc_feature 95, 96, 97, 98, 99, 100: n = A,T,C or G
gactggaagagcactgttaaaaccaacctacgacgaaaacgcactagttggaggctcatcgttcctattcaggcagatgttatcgaggtccgacnnnnnntacaaacgacgaaccgacaactctccgatcggatacgcatgaggct

SEQ ID NO: 615 - DNA, 146 bp, Artificial Sequence
  Bisulfite Padlock Probe
  misc_feature 95, 96, 97, 98, 99, 100: n = A,T,C or G
gactggaagagcactgttaaaaccaacctacgacgaaaacgcgctagttggaggctcatcgttcctattcaggcagatgttatcgaggtccgacnnnnnntacaaacgacgaaccgacgactctccgatcggatacgcatgaggct

SEQ ID NO: 616 - DNA, 146 bp, Artificial Sequence
  Bisulfite Padlock Probe
  misc_feature 96, 97, 98, 99, 100, 101: n = A,T,C or G
gactggaagagcactgttaaaaccacgataaacttctacgaacacacgttggaggctcatcgttcctattcaggcagatgttatcgaggtccgacnnnnnnccaacccgcaaactacaccaaaaccgatcggatacgcatgaggct

SEQ ID NO: 617 - DNA, 146 bp, Artificial Sequence
  Bisulfite Padlock Probe
  misc_feature 96, 97, 98, 99, 100, 101: n = A,T,C or G
gactggaagagcactgttaaaaccacgataaacttctacgaacgcacgttggaggctcatcgttcctattcaggcagatgttatcgaggtccgacnnnnnnccaacccgcaaactacaccgaaaccgatcggatacgcatgaggct

SEQ ID NO: 618 - DNA, 146 bp, Artificial Sequence
  Bisulfite Padlock Probe
  misc_feature 92, 93, 94, 95, 96, 97: n = A,T,C or G
gactggaagagcactgttaaaaccactcaaaactccccaaaaagttggaggctcatcgttcctattcaggcagatgttatcgaggtccgacnnnnnntaacctttacccaacaacacaaaaaacccgatcggatacgcatgaggct

SEQ ID NO: 619 - DNA, 146 bp, Artificial Sequence
  Bisulfite Padlock Probe
  misc_feature 96, 97, 98, 99, 100, 101: n = A,T,C or G
gactggaagagcactgttaaaaccatcgaaaaactccaaaaaactacgttggaggctcatcgttcctattcaggcagatgttatcgaggtccgacnnnnnntctctactaaaatcaacatctatacgatcggatacgcatgaggct

SEQ ID NO: 620 - DNA, 146 bp, Artificial Sequence
  Bisulfite Padlock Probe
  misc_feature 96, 97, 98, 99, 100, 101: n = A,T,C or G
gactggaagagcactgttaaaaccatcgaaaaactccgaaaaactacgttggaggctcatcgttcctattcaggcagatgttatcgaggtccgacnnnnnntctctactaaaatcaacgtctatacgatcggatacgcatgaggct

SEQ ID NO: 621 - DNA, 146 bp, Artificial Sequence
  Bisulfite Padlock Probe
  misc_feature 92, 93, 94, 95, 96, 97: n = A,T,C or G
gactggaagagcactgttaaaaccattaaaatatacaaaacccgttggaggctcatcgttcctattcaggcagatgttatcgaggtccgacnnnnnnctcttccccaccccacctcaataactattgatcggatacgcatgaggct

SEQ ID NO: 622 - DNA, 146 bp, Artificial Sequence
  Bisulfite Padlock Probe
  misc_feature 92, 93, 94, 95, 96, 97: n = A,T,C or G
gactggaagagcactgttaaaaccatttacataaaaacaaacagttggaggctcatcgttcctattcaggcagatgttatcgaggtccgacnnnnnncaactcctcccaaccccaatcactaaaccgatcggatacgcatgaggct

SEQ ID NO: 623 - DNA, 146 bp, Artificial Sequence
  Bisulfite Padlock Probe
  misc_feature 96, 97, 98, 99, 100, 101: n = A,T,C or G
gactggaagagcactgttaaaacccaaattatcccaacacaaaatcagttggaggctcatcgttcctattcaggcagatgttatcgaggtccgacnnnnnnaaacaaaaatacctcatttacatacgatcggatacgcatgaggct

SEQ ID NO: 624 - DNA, 146 bp, Artificial Sequence
  Bisulfite Padlock Probe
  misc_feature 96, 97, 98, 99, 100, 101: n = A,T,C or G
gactggaagagcactgttaaaacccactaactaacctcaacttcaacgttggaggctcatcgttcctattcaggcagatgttatcgaggtccgacnnnnnnacaaccaaaaatcgctacaacccccgatcggatacgcatgaggct

SEQ ID NO: 625 - DNA, 146 bp, Artificial Sequence
  Bisulfite Padlock Probe
  misc_feature 92, 93, 94, 95, 96, 97: n = A,T,C or G
gactggaagagcactgttaaaaccccctaaatcccaaaccaacgttggaggctcatcgttcctattcaggcagatgttatcgaggtccgacnnnnnnctctatacatacttcaaacccaaaacccagatcggatacgcatgaggct

SEQ ID NO: 626 - DNA, 146 bp, Artificial Sequence
  Bisulfite Padlock Probe
  misc_feature 92, 93, 94, 95, 96, 97: n = A,T,C or G
gactggaagagcactgttaaaaccccctaaatcccaaaccaacgttggaggctcatcgttcctattcaggcagatgttatcgaggtccgacnnnnnnctctatacgtacttcaaacccaaaacccagatcggatacgcatgaggct

SEQ ID NO: 627 - DNA, 146 bp, Artificial Sequence
  Bisulfite Padlock Probe
  misc_feature 92, 93, 94, 95, 96, 97: n = A,T,C or G
gactggaagagcactgttaaaaccccgaaaacaaaatactctcgttggaggctcatcgttcctattcaggcagatgttatcgaggtccgacnnnnnnactaatatcaaaatctaaactaactcaccgatcggatacgcatgaggct

SEQ ID NO: 628 - DNA, 146 bp, Artificial Sequence
  Bisulfite Padlock Probe
  misc_feature 92, 93, 94, 95, 96, 97: n = A,T,C or G
gactggaagagcactgttaaaaccccgaaaacgaaatactctcgttggaggctcatcgttcctattcaggcagatgttatcgaggtccgacnnnnnnactaatatcaaaatctaaactaactcaccgatcggatacgcatgaggct

SEQ ID NO: 629 - DNA, 146 bp, Artificial Sequence
  Bisulfite Padlock Probe
  misc_feature 92, 93, 94, 95, 96, 97: n = A,T,C or G
gactggaagagcactgttaaaaccccgaccaaaaccaaaaaacgttggaggctcatcgttcctattcaggcagatgttatcgaggtccgacnnnnnncttacccttaaatacgaaacccaaaacctgatcggatacgcatgaggct

SEQ ID NO: 630 - DNA, 146 bp, Artificial Sequence
  Bisulfite Padlock Probe
  misc_feature 92, 93, 94, 95, 96, 97: n = A,T,C or G
gactggaagagcactgttaaaaccccgaccaaaaccgaaaaacgttggaggctcatcgttcctattcaggcagatgttatcgaggtccgacnnnnnncttacccttaaatacgaaacccgaaacctgatcggatacgcatgaggct

SEQ ID NO: 631 - DNA, 146 bp, Artificial Sequence
  Bisulfite Padlock Probe
  misc_feature 93, 94, 95, 96, 97, 98: n = A,T,C or G
gactggaagagcactgttaaaacccctaccaaatttaacctcccgttggaggctcatcgttcctattcaggcagatgttatcgaggtccgacnnnnnnaaaacccacactaaaaatcaaaacaaccgatcggatacgcatgaggct

SEQ ID NO: 632 - DNA, 146 bp, Artificial Sequence
  Bisulfite Padlock Probe
  misc_feature 93, 94, 95, 96, 97, 98: n = A,T,C or G
gactggaagagcactgttaaaacccctaccaaatttaacctcccgttggaggctcatcgttcctattcaggcagatgttatcgaggtccgacnnnnnnaaaacccgcactaaaaatcaaaacaaccgatcggatacgcatgaggct

SEQ ID NO: 633 - DNA, 146 bp, Artificial Sequence
  Bisulfite Padlock Probe
  misc_feature 94, 95, 96, 97, 98, 99: n = A,T,C or G
gactggaagagcactgttaaaacccctctaaaaccacctaaactcgttggaggctcatcgttcctattcaggcagatgttatcgaggtccgacnnnnnnttttctctctcaacctctcctccctccgatcggatacgcatgaggct

SEQ ID NO: 634 - DNA, 146 bp, Artificial Sequence
  Bisulfite Padlock Probe
  misc_feature 94, 95, 96, 97, 98, 99: n = A,T,C or G
gactggaagagcactgttaaaacccctctaaaaccgcctaaactcgttggaggctcatcgttcctattcaggcagatgttatcgaggtccgacnnnnnnttttctctctcgacctctcctccctccgatcggatacgcatgaggct

SEQ ID NO: 635 - DNA, 146 bp, Artificial Sequence
  Bisulfite Padlock Probe
  misc_feature 93, 94, 95, 96, 97, 98: n = A,T,C or G
gactggaagagcactgttaaaacccgaaccccacaaaaatttacgttggaggctcatcgttcctattcaggcagatgttatcgaggtccgacnnnnnnaccctaaaccccaaatctcctacaaaccgatcggatacgcatgaggct

SEQ ID NO: 636 - DNA, 146 bp, Artificial Sequence
  Bisulfite Padlock Probe
  misc_feature 93, 94, 95, 96, 97, 98: n = A,T,C or G
gactggaagagcactgttaaaacccgaaccccgcaaaaatttacgttggaggctcatcgttcctattcaggcagatgttatcgaggtccgacnnnnnnaccctaaaccccgaatctcctacaaaccgatcggatacgcatgaggct

SEQ ID NO: 637 - DNA, 146 bp, Artificial Sequence
  Bisulfite Padlock Probe
  misc_feature 93, 94, 95, 96, 97, 98: n = A,T,C or G
gactggaagagcactgttaaaacccgcgacgaaacgacaaaaaagttggaggctcatcgttcctattcaggcagatgttatcgaggtccgacnnnnnnaaaaacaaaattaaaaaccaaacaaaaagatcggatacgcatgaggct

SEQ ID NO: 638 - DNA, 146 bp, Artificial Sequence
  Bisulfite Padlock Probe
  misc_feature 93, 94, 95, 96, 97, 98: n = A,T,C or G
gactggaagagcactgttaaaacccgcgacgaaacgacgaaaaagttggaggctcatcgttcctattcaggcagatgttatcgaggtccgacnnnnnnaaaaacaaaattaaaaaccaaacaaaaagatcggatacgcatgaggct

SEQ ID NO: 639 - DNA, 146 bp, Artificial Sequence
  Bisulfite Padlock Probe
  misc_feature 96, 97, 98, 99, 100, 101: n = A,T,C or G
gactggaagagcactgttaaaacccgctaactaacctcaacttcaacgttggaggctcatcgttcctattcaggcagatgttatcgaggtccgacnnnnnnacaaccaaaaatcgctacgacccccgatcggatacgcatgaggct

SEQ ID NO: 640 - DNA, 146 bp, Artificial Sequence
  Bisulfite Padlock Probe
  misc_feature 93, 94, 95, 96, 97, 98: n = A,T,C or G
gactggaagagcactgttaaaacccgctacaactctccctactagttggaggctcatcgttcctattcaggcagatgttatcgaggtccgacnnnnnntcgtacgtaactaaaacgccataccaatgatcggatacgcatgaggct

SEQ ID NO: 641 - DNA, 146 bp, Artificial Sequence
  Bisulfite Padlock Probe
  misc_feature 93, 94, 95, 96, 97, 98: n = A,T,C or G
gactggaagagcactgttaaaacccgctacgactctccctactagttggaggctcatcgttcctattcaggcagatgttatcgaggtccgacnnnnnntcgtacgtaactaaaacgccataccgatgatcggatacgcatgaggct

SEQ ID NO: 642 - DNA, 146 bp, Artificial Sequence
  Bisulfite Padlock Probe
  misc_feature 96, 97, 98, 99, 100, 101: n = A,T,C or G
gactggaagagcactgttaaaaccctaaacgttaaaaacattaaccagttggaggctcatcgttcctattcaggcagatgttatcgaggtccgacnnnnnnaaaccgaaaacttaaaaacaaaaaagatcggatacgcatgaggct

SEQ ID NO: 643 - DNA, 146 bp, Artificial Sequence
  Bisulfite Padlock Probe
  misc_feature 96, 97, 98, 99, 100, 101: n = A,T,C or G
gactggaagagcactgttaaaaccctaaacgttaaaaacgttaaccagttggaggctcatcgttcctattcaggcagatgttatcgaggtccgacnnnnnnaaaccgaaaacttaaaaacgaaaaagatcggatacgcatgaggct

SEQ ID NO: 644 - DNA, 146 bp, Artificial Sequence
  Bisulfite Padlock Probe
  misc_feature 92, 93, 94, 95, 96, 97: n = A,T,C or G
gactggaagagcactgttaaaaccgaaatccgcaactccaaccgttggaggctcatcgttcctattcaggcagatgttatcgaggtccgacnnnnnnaaactacgaacaactacaaacctaaaaacgatcggatacgcatgaggct

SEQ ID NO: 645 - DNA, 146 bp, Artificial Sequence
  Bisulfite Padlock Probe
  misc_feature 92, 93, 94, 95, 96, 97: n = A,T,C or G
gactggaagagcactgttaaaaccgaaatccgcaactccgaccgttggaggctcatcgttcctattcaggcagatgttatcgaggtccgacnnnnnnaaactacgaacgactacaaacctaaaaacgatcggatacgcatgaggct

SEQ ID NO: 646 - DNA, 146 bp, Artificial Sequence
  Bisulfite Padlock Probe
  misc_feature 96, 97, 98, 99, 100, 101: n = A,T,C or G
gactggaagagcactgttaaaaccgaacgaacgacaacatccctaacgttggaggctcatcgttcctattcaggcagatgttatcgaggtccgacnnnnnnaaccctatccccgactccaaccaatgatcggatacgcatgaggct

SEQ ID NO: 647 - DNA, 146 bp, Artificial Sequence
  Bisulfite Padlock Probe
  misc_feature 96, 97, 98, 99, 100, 101: n = A,T,C or G
gactggaagagcactgttaaaaccgaacgaacgacgacatccctaacgttggaggctcatcgttcctattcaggcagatgttatcgaggtccgacnnnnnnaaccctatccccgactccgaccaatgatcggatacgcatgaggct

SEQ ID NO: 648 - DNA, 146 bp, Artificial Sequence
  Bisulfite Padlock Probe
  misc_feature 92, 93, 94, 95, 96, 97: n = A,T,C or G
gactggaagagcactgttaaaaccgaccaacctaccctaaatagttggaggctcatcgttcctattcaggcagatgttatcgaggtccgacnnnnnnaataccctatcaaacaaaaactctaaaaagatcggatacgcatgaggct

SEQ ID NO: 649 - DNA, 146 bp, Artificial Sequence
  Bisulfite Padlock Probe
  misc_feature 96, 97, 98, 99, 100, 101: n = A,T,C or G
gactggaagagcactgttaaaaccgcctaaacctaatacatataaccgttggaggctcatcgttcctattcaggcagatgttatcgaggtccgacnnnnnncccgaaacctccccaatacccaaaagatcggatacgcatgaggct

SEQ ID NO: 650 - DNA, 146 bp, Artificial Sequence
  Bisulfite Padlock Probe
  misc_feature 96, 97, 98, 99, 100, 101: n = A,T,C or G
gactggaagagcactgttaaaaccgcctaaacctaatacgtataaccgttggaggctcatcgttcctattcaggcagatgttatcgaggtccgacnnnnnncccgaaacctccccgatacccaaaagatcggatacgcatgaggct

SEQ ID NO: 651 - DNA, 146 bp, Artificial Sequence
  Bisulfite Padlock Probe
  misc_feature 94, 95, 96, 97, 98, 99: n = A,T,C or G
gactggaagagcactgttaaaaccgcgcgataatctcaaaacaacgttggaggctcatcgttcctattcaggcagatgttatcgaggtccgacnnnnnncttaaaacacaatacccaccccatcccgatcggatacgcatgaggct

SEQ ID NO: 652 - DNA, 146 bp, Artificial Sequence
  Bisulfite Padlock Probe
  misc_feature 94, 95, 96, 97, 98, 99: n = A,T,C or G
gactggaagagcactgttaaaaccgcgcgataatctcgaaacaacgttggaggctcatcgttcctattcaggcagatgttatcgaggtccgacnnnnnncttaaaacgcaatacccaccccatcccgatcggatacgcatgaggct

SEQ ID NO: 653 - DNA, 146 bp, Artificial Sequence
  Bisulfite Padlock Probe
  misc_feature 92, 93, 94, 95, 96, 97: n = A,T,C or G
gactggaagagcactgttaaaaccgctcaaaactccccaaaaagttggaggctcatcgttcctattcaggcagatgttatcgaggtccgacnnnnnntaacctttacccaacaacacgaaaaacccgatcggatacgcatgaggct

SEQ ID NO: 654 - DNA, 146 bp, Artificial Sequence
  Bisulfite Padlock Probe
  misc_feature 96, 97, 98, 99, 100, 101: n = A,T,C or G
gactggaagagcactgttaaaaccgtaataataaacataaacctaacgttggaggctcatcgttcctattcaggcagatgttatcgaggtccgacnnnnnntcccttacccaacaactaaaaatccgatcggatacgcatgaggct

SEQ ID NO: 655 - DNA, 146 bp, Artificial Sequence
  Bisulfite Padlock Probe
  misc_feature 96, 97, 98, 99, 100, 101: n = A,T,C or G
gactggaagagcactgttaaaaccgtaataataaacgtaaacctaacgttggaggctcatcgttcctattcaggcagatgttatcgaggtccgacnnnnnntcccttacccaacgactaaaaatccgatcggatacgcatgaggct

SEQ ID NO: 656 - DNA, 146 bp, Artificial Sequence
  Bisulfite Padlock Probe
  misc_feature 92, 93, 94, 95, 96, 97: n = A,T,C or G
gactggaagagcactgttaaaaccgttaaaatatacaaaacccgttggaggctcatcgttcctattcaggcagatgttatcgaggtccgacnnnnnnctcttccccaccccacctcgataactattgatcggatacgcatgaggct

SEQ ID NO: 657 - DNA, 146 bp, Artificial Sequence
  Bisulfite Padlock Probe
  misc_feature 93, 94, 95, 96, 97, 98: n = A,T,C or G
gactggaagagcactgttaaaacctaaaaacgatcaacacccccgttggaggctcatcgttcctattcaggcagatgttatcgaggtccgacnnnnnnaaaaaccaacaaaacacgaacacacccagatcggatacgcatgaggct

SEQ ID NO: 658 - DNA, 146 bp, Artificial Sequence
  Bisulfite Padlock Probe
  misc_feature 93, 94, 95, 96, 97, 98: n = A,T,C or G
gactggaagagcactgttaaaacctaaaaacgatcaacgcccccgttggaggctcatcgttcctattcaggcagatgttatcgaggtccgacnnnnnnaaaaaccaacaaaacacgaacacgcccagatcggatacgcatgaggct

SEQ ID NO: 659 - DNA, 146 bp, Artificial Sequence
  Bisulfite Padlock Probe
  misc_feature 95, 96, 97, 98, 99, 100: n = A,T,C or G
gactggaagagcactgttaaaacctaaacgcgaaaacgcaaaacccgttggaggctcatcgttcctattcaggcagatgttatcgaggtccgacnnnnnnaaaattccctacgaacccaaaaactcgatcggatacgcatgaggct

SEQ ID NO: 660 - DNA, 146 bp, Artificial Sequence
  Bisulfite Padlock Probe
  misc_feature 95, 96, 97, 98, 99, 100: n = A,T,C or G
gactggaagagcactgttaaaacctaaacgcgaaaacgcgaaacccgttggaggctcatcgttcctattcaggcagatgttatcgaggtccgacnnnnnnaaaattccctacgaacccgaaaactcgatcggatacgcatgaggct

SEQ ID NO: 661 - DNA, 146 bp, Artificial Sequence
  Bisulfite Padlock Probe
  misc_feature 95, 96, 97, 98, 99, 100: n = A,T,C or G
gactggaagagcactgttaaaacctaataaccctaatcaacacctcgttggaggctcatcgttcctattcaggcagatgttatcgaggtccgacnnnnnntccgaaacgtcaataacaacacacccgatcggatacgcatgaggct

SEQ ID NO: 662 - DNA, 146 bp, Artificial Sequence
  Bisulfite Padlock Probe
  misc_feature 95, 96, 97, 98, 99, 100: n = A,T,C or G
gactggaagagcactgttaaaacctaataaccctaatcaacacctcgttggaggctcatcgttcctattcaggcagatgttatcgaggtccgacnnnnnntccgaaacgtcaataacaacgcacccgatcggatacgcatgaggct

SEQ ID NO: 663 - DNA, 146 bp, Artificial Sequence
  Bisulfite Padlock Probe
  misc_feature 92, 93, 94, 95, 96, 97: n = A,T,C or G
gactggaagagcactgttaaaacctacaactataactaaactcgttggaggctcatcgttcctattcaggcagatgttatcgaggtccgacnnnnnncgaccccgattaacgcaaattcaaaatacgatcggatacgcatgaggct

SEQ ID NO: 664 - DNA, 146 bp, Artificial Sequence
  Bisulfite Padlock Probe
  misc_feature 92, 93, 94, 95, 96, 97: n = A,T,C or G
gactggaagagcactgttaaaacctacaactataactaaactcgttggaggctcatcgttcctattcaggcagatgttatcgaggtccgacnnnnnncgaccccgattaacgcaaattcgaaatacgatcggatacgcatgaggct

SEQ ID NO: 665 - DNA, 146 bp, Artificial Sequence
  Bisulfite Padlock Probe
  misc_feature 93, 94, 95, 96, 97, 98: n = A,T,C or G
gactggaagagcactgttaaaacctaccgataaccgccttccacgttggaggctcatcgttcctattcaggcagatgttatcgaggtccgacnnnnnncaacccgaaccgaaacaaccatcttaacgatcggatacgcatgaggct

SEQ ID NO: 666 - DNA, 146 bp, Artificial Sequence
  Bisulfite Padlock Probe
  misc_feature 93, 94, 95, 96, 97, 98: n = A,T,C or G
gactggaagagcactgttaaaacctaccgataaccgccttccgcgttggaggctcatcgttcctattcaggcagatgttatcgaggtccgacnnnnnncaacccgaaccgaaacgaccatcttaacgatcggatacgcatgaggct

SEQ ID NO: 667 - DNA, 146 bp, Artificial Sequence
  Bisulfite Padlock Probe
  misc_feature 93, 94, 95, 96, 97, 98: n = A,T,C or G
gactggaagagcactgttaaaacctacgaaacctacaaactaaagttggaggctcatcgttcctattcaggcagatgttatcgaggtccgacnnnnnnctttactctaattctaaaataaaacaacgatcggatacgcatgaggct

SEQ ID NO: 668 - DNA, 146 bp, Artificial Sequence
  Bisulfite Padlock Probe
  misc_feature 93, 94, 95, 96, 97, 98: n = A,T,C or G
gactggaagagcactgttaaaacctacgaaacctacgaactaaagttggaggctcatcgttcctattcaggcagatgttatcgaggtccgacnnnnnnctttactctaattctaaaataaaacgacgatcggatacgcatgaggct

SEQ ID NO: 669 - DNA, 146 bp, Artificial Sequence
  Bisulfite Padlock Probe
  misc_feature 96, 97, 98, 99, 100, 101: n = A,T,C or G
gactggaagagcactgttaaaacctcgaacgacgcaaaccctaaatagttggaggctcatcgttcctattcaggcagatgttatcgaggtccgacnnnnnnccaaaaacaaaaaccgcataccaccgatcggatacgcatgaggct

SEQ ID NO: 670 - DNA, 146 bp, Artificial Sequence
  Bisulfite Padlock Probe
  misc_feature 96, 97, 98, 99, 100, 101: n = A,T,C or G
gactggaagagcactgttaaaacctcgaacgacgcgaaccctaaatagttggaggctcatcgttcctattcaggcagatgttatcgaggtccgacnnnnnnccaaaaacaaaaaccgcataccgccgatcggatacgcatgaggct

SEQ ID NO: 671 - DNA, 146 bp, Artificial Sequence
  Bisulfite Padlock Probe
  misc_feature 94, 95, 96, 97, 98, 99: n = A,T,C or G
gactggaagagcactgttaaaaccttcaacttcatcctactctacgttggaggctcatcgttcctattcaggcagatgttatcgaggtccgacnnnnnncaacgaaacgacctcaataatactaaagatcggatacgcatgaggct

SEQ ID NO: 672 - DNA, 146 bp, Artificial Sequence
  Bisulfite Padlock Probe
  misc_feature 92, 93, 94, 95, 96, 97: n = A,T,C or G
gactggaagagcactgttaaaaccttcgactaaatctcgacacgttggaggctcatcgttcctattcaggcagatgttatcgaggtccgacnnnnnnaataaccctaaaataaacgctacaaaaaagatcggatacgcatgaggct

SEQ ID NO: 673 - DNA, 146 bp, Artificial Sequence
  Bisulfite Padlock Probe
  misc_feature 92, 93, 94, 95, 96, 97: n = A,T,C or G
gactggaagagcactgttaaaaccttcgactaaatctcgacgcgttggaggctcatcgttcctattcaggcagatgttatcgaggtccgacnnnnnnaataaccctaaaataaacgctacgaaaaagatcggatacgcatgaggct

SEQ ID NO: 674 - DNA, 146 bp, Artificial Sequence
  Bisulfite Padlock Probe
  misc_feature 94, 95, 96, 97, 98, 99: n = A,T,C or G
gactggaagagcactgttaaaaccttcgacttcatcctactctacgttggaggctcatcgttcctattcaggcagatgttatcgaggtccgacnnnnnncaacgaaacgacctcgataatactaaagatcggatacgcatgaggct

SEQ ID NO: 675 - DNA, 146 bp, Artificial Sequence
  Bisulfite Padlock Probe
  misc_feature 95, 96, 97, 98, 99, 100: n = A,T,C or G
gactggaagagcactgttaaaacgaaaaacaccaactatacacatagttggaggctcatcgttcctattcaggcagatgttatcgaggtccgacnnnnnnacttctaaaccaccacgaccaacatcgatcggatacgcatgaggct

SEQ ID NO: 676 - DNA, 146 bp, Artificial Sequence
  Bisulfite Padlock Probe
  misc_feature 92, 93, 94, 95, 96, 97: n = A,T,C or G
gactggaagagcactgttaaaacgaaaaaccaaaactcaaaaagttggaggctcatcgttcctattcaggcagatgttatcgaggtccgacnnnnnnaaaaatccgaaaataatcaaaaacctaacgatcggatacgcatgaggct

SEQ ID NO: 677 - DNA, 146 bp, Artificial Sequence
  Bisulfite Padlock Probe
  misc_feature 92, 93, 94, 95, 96, 97: n = A,T,C or G
gactggaagagcactgttaaaacgaaaaaccgaaactcaaaaagttggaggctcatcgttcctattcaggcagatgttatcgaggtccgacnnnnnnaaaaatccgaaaataatcgaaaacctaacgatcggatacgcatgaggct

SEQ ID NO: 678 - DNA, 146 bp, Artificial Sequence
  Bisulfite Padlock Probe
  misc_feature 94, 95, 96, 97, 98, 99: n = A,T,C or G
gactggaagagcactgttaaaacgaaaaaccgacaaaaacaacccgttggaggctcatcgttcctattcaggcagatgttatcgaggtccgacnnnnnnctaaaatccctaaacctactacccaacgatcggatacgcatgaggct

SEQ ID NO: 679 - DNA, 146 bp, Artificial Sequence
  Bisulfite Padlock Probe
  misc_feature 94, 95, 96, 97, 98, 99: n = A,T,C or G
gactggaagagcactgttaaaacgaaaaaccgacgaaaacaacccgttggaggctcatcgttcctattcaggcagatgttatcgaggtccgacnnnnnnctaaaatccctaaacctactacccaacgatcggatacgcatgaggct

SEQ ID NO: 680 - DNA, 146 bp, Artificial Sequence
  Bisulfite Padlock Probe
  misc_feature 95, 96, 97, 98, 99, 100: n = A,T,C or G
gactggaagagcactgttaaaacgaaaaacgccaactatacacatagttggaggctcatcgttcctattcaggcagatgttatcgaggtccgacnnnnnnacttctaaaccaccacgaccaacgtcgatcggatacgcatgaggct

SEQ ID NO: 681 - DNA, 146 bp, Artificial Sequence
  Bisulfite Padlock Probe
  misc_feature 94, 95, 96, 97, 98, 99: n = A,T,C or G
gactggaagagcactgttaaaacgaaaaactaacaaccctaaaccgttggaggctcatcgttcctattcaggcagatgttatcgaggtccgacnnnnnnccaaactcttaaccacacacatcccccgatcggatacgcatgaggct

SEQ ID NO: 682 - DNA, 146 bp, Artificial Sequence
  Bisulfite Padlock Probe
  misc_feature 94, 95, 96, 97, 98, 99: n = A,T,C or G
gactggaagagcactgttaaaacgaaaaactaacgaccctaaaccgttggaggctcatcgttcctattcaggcagatgttatcgaggtccgacnnnnnnccgaactcttaaccacacacatcccccgatcggatacgcatgaggct

SEQ ID NO: 683 - DNA, 146 bp, Artificial Sequence
  Bisulfite Padlock Probe
  misc_feature 94, 95, 96, 97, 98, 99: n = A,T,C or G
gactggaagagcactgttaaaacgaaaaccctacaattaaacacagttggaggctcatcgttcctattcaggcagatgttatcgaggtccgacnnnnnnaaaaatacaaatacgaaactccaaaaagatcggatacgcatgaggct

SEQ ID NO: 684 - DNA, 146 bp, Artificial Sequence
  Bisulfite Padlock Probe
  misc_feature 93, 94, 95, 96, 97, 98: n = A,T,C or G
gactggaagagcactgttaaaacgaaaacgaaaacgacgacaacgttggaggctcatcgttcctattcaggcagatgttatcgaggtccgacnnnnnntctaaattcctctccatctccctcccacgatcggatacgcatgaggct

SEQ ID NO: 685 - DNA, 146 bp, Artificial Sequence
  Bisulfite Padlock Probe
  misc_feature 93, 94, 95, 96, 97, 98: n = A,T,C or G
gactggaagagcactgttaaaacgaaaacgaaaacgacgacgacgttggaggctcatcgttcctattcaggcagatgttatcgaggtccgacnnnnnntctaaattcctctccgtctccctcccacgatcggatacgcatgaggct

SEQ ID NO: 686 - DNA, 146 bp, Artificial Sequence
  Bisulfite Padlock Probe
  misc_feature 96, 97, 98, 99, 100, 101: n = A,T,C or G
gactggaagagcactgttaaaacgaaacaaattatataaaaacaaccgttggaggctcatcgttcctattcaggcagatgttatcgaggtccgacnnnnnnaccccgaaaacgccaaataaatcacgatcggatacgcatgaggct

SEQ ID NO: 687 - DNA, 146 bp, Artificial Sequence
  Bisulfite Padlock Probe
  misc_feature 96, 97, 98, 99, 100, 101: n = A,T,C or G
gactggaagagcactgttaaaacgaaacaaattatataaaaacgaccgttggaggctcatcgttcctattcaggcagatgttatcgaggtccgacnnnnnnaccccgaaaacgccaaataaatcgcgatcggatacgcatgaggct

SEQ ID NO: 688 - DNA, 146 bp, Artificial Sequence
  Bisulfite Padlock Probe
  misc_feature 94, 95, 96, 97, 98, 99: n = A,T,C or G
gactggaagagcactgttaaaacgaaaccgccaaatctacaaaacgttggaggctcatcgttcctattcaggcagatgttatcgaggtccgacnnnnnncctaacccctaaaaacaaccctccctcgatcggatacgcatgaggct

SEQ ID NO: 689 - DNA, 146 bp, Artificial Sequence
  Bisulfite Padlock Probe
  misc_feature 94, 95, 96, 97, 98, 99: n = A,T,C or G
gactggaagagcactgttaaaacgaaaccgccaaatctacgaaacgttggaggctcatcgttcctattcaggcagatgttatcgaggtccgacnnnnnncctaacccctaaaaacgaccctccctcgatcggatacgcatgaggct

SEQ ID NO: 690 - DNA, 146 bp, Artificial Sequence
  Bisulfite Padlock Probe
  misc_feature 96, 97, 98, 99, 100, 101: n = A,T,C or G
gactggaagagcactgttaaaacgaaacctaaacgcgaacaacaaaagttggaggctcatcgttcctattcaggcagatgttatcgaggtccgacnnnnnnaataatatacgtaccaccataaaaagatcggatacgcatgaggct

SEQ ID NO: 691 - DNA, 146 bp, Artificial Sequence
  Bisulfite Padlock Probe
  misc_feature 96, 97, 98, 99, 100, 101: n = A,T,C or G
gactggaagagcactgttaaaacgaaacctaaacgcgaacgacaaaagttggaggctcatcgttcctattcaggcagatgttatcgaggtccgacnnnnnnaataatatacgtaccaccgtaaaaagatcggatacgcatgaggct

SEQ ID NO: 692 - DNA, 146 bp, Artificial Sequence
  Bisulfite Padlock Probe
  misc_feature 92, 93, 94, 95, 96, 97: n = A,T,C or G
gactggaagagcactgttaaaacgaaactaaaaatacaaattcgttggaggctcatcgttcctattcaggcagatgttatcgaggtccgacnnnnnnacctctcttcacttcccacctcgataaccgatcggatacgcatgaggct

SEQ ID NO: 693 - DNA, 146 bp, Artificial Sequence
  Bisulfite Padlock Probe
  misc_feature 94, 95, 96, 97, 98, 99: n = A,T,C or G
gactggaagagcactgttaaaacgaaataaccacaaaacctctacgttggaggctcatcgttcctattcaggcagatgttatcgaggtccgacnnnnnnaaaattccctcgaaaaacccaataaaagatcggatacgcatgaggct

SEQ ID NO: 694 - DNA, 146 bp, Artificial Sequence
  Bisulfite Padlock Probe
  misc_feature 94, 95, 96, 97, 98, 99: n = A,T,C or G
gactggaagagcactgttaaaacgaaataaccgcaaaacctctacgttggaggctcatcgttcctattcaggcagatgttatcgaggtccgacnnnnnnaaaattccctcgaaaaacccgataaaagatcggatacgcatgaggct

SEQ ID NO: 695 - DNA, 146 bp, Artificial Sequence
  Bisulfite Padlock Probe
  misc_feature 93, 94, 95, 96, 97, 98: n = A,T,C or G
gactggaagagcactgttaaaacgaaatcacgtcccacccaaacgttggaggctcatcgttcctattcaggcagatgttatcgaggtccgacnnnnnncgatccgtaaacaaaaccgacacaactcgatcggatacgcatgaggct

SEQ ID NO: 696 - DNA, 146 bp, Artificial Sequence
  Bisulfite Padlock Probe
  misc_feature 93, 94, 95, 96, 97, 98: n = A,T,C or G
gactggaagagcactgttaaaacgaaatcacgtcccacccgaacgttggaggctcatcgttcctattcaggcagatgttatcgaggtccgacnnnnnncgatccgtaaacaaaaccgacgcaactcgatcggatacgcatgaggct

SEQ ID NO: 697 - DNA, 146 bp, Artificial Sequence
  Bisulfite Padlock Probe
  misc_feature 95, 96, 97, 98, 99, 100: n = A,T,C or G
gactggaagagcactgttaaaacgaacccaaattataatttaaaaagttggaggctcatcgttcctattcaggcagatgttatcgaggtccgacnnnnnnccaataccctccctacctcacccctcgatcggatacgcatgaggct

SEQ ID NO: 698 - DNA, 146 bp, Artificial Sequence
  Bisulfite Padlock Probe
  misc_feature 95, 96, 97, 98, 99, 100: n = A,T,C or G
gactggaagagcactgttaaaacgaacccgaattataatttaaaaagttggaggctcatcgttcctattcaggcagatgttatcgaggtccgacnnnnnnccaataccctccctacctcacccctcgatcggatacgcatgaggct

SEQ ID NO: 699 - DNA, 146 bp, Artificial Sequence
  Bisulfite Padlock Probe
  misc_feature 92, 93, 94, 95, 96, 97: n = A,T,C or G
gactggaagagcactgttaaaacgaatacgaccaaaacaaatcgttggaggctcatcgttcctattcaggcagatgttatcgaggtccgacnnnnnnaaaactaaaaataaaactaaaactaaaccgatcggatacgcatgaggct

SEQ ID NO: 700 - DNA, 146 bp, Artificial Sequence
  Bisulfite Padlock Probe
  misc_feature 92, 93, 94, 95, 96, 97: n = A,T,C or G
gactggaagagcactgttaaaacgaatacgaccgaaacaaatcgttggaggctcatcgttcctattcaggcagatgttatcgaggtccgacnnnnnnaaaactaaaaataaaactaaaactaaaccgatcggatacgcatgaggct

SEQ ID NO: 701 - DNA, 146 bp, Artificial Sequence
  Bisulfite Padlock Probe
  misc_feature 96, 97, 98, 99, 100, 101: n = A,T,C or G
gactggaagagcactgttaaaacgaatcaacgaacaactccaacaacgttggaggctcatcgttcctattcaggcagatgttatcgaggtccgacnnnnnnctaccctccataacgccaactacccgatcggatacgcatgaggct

SEQ ID NO: 702 - DNA, 146 bp, Artificial Sequence
  Bisulfite Padlock Probe
  misc_feature 96, 97, 98, 99, 100, 101: n = A,T,C or G
gactggaagagcactgttaaaacgaatcaacgaacgactccaacaacgttggaggctcatcgttcctattcaggcagatgttatcgaggtccgacnnnnnnctaccctccataacgccgactacccgatcggatacgcatgaggct

SEQ ID NO: 703 - DNA, 146 bp, Artificial Sequence
  Bisulfite Padlock Probe
  misc_feature 95, 96, 97, 98, 99, 100: n = A,T,C or G
gactggaagagcactgttaaaacgacaacgaaacgaaacatattccgttggaggctcatcgttcctattcaggcagatgttatcgaggtccgacnnnnnnccgcgaaacgcacaacaaatcaaaacgatcggatacgcatgaggct

SEQ ID NO: 704 - DNA, 146 bp, Artificial Sequence
  Bisulfite Padlock Probe
  misc_feature 95, 96, 97, 98, 99, 100: n = A,T,C or G
gactggaagagcactgttaaaacgacaacgaaacgaaacgtattccgttggaggctcatcgttcctattcaggcagatgttatcgaggtccgacnnnnnnccgcgaaacgcacaacgaatcaaaacgatcggatacgcatgaggct

SEQ ID NO: 705 - DNA, 146 bp, Artificial Sequence
  Bisulfite Padlock Probe
  misc_feature 94, 95, 96, 97, 98, 99: n = A,T,C or G
gactggaagagcactgttaaaacgaccaaataataccaaacataagttggaggctcatcgttcctattcaggcagatgttatcgaggtccgacnnnnnntatccccctttcccaatccctacctccgatcggatacgcatgaggct

SEQ ID NO: 706 - DNA, 146 bp, Artificial Sequence
  Bisulfite Padlock Probe
  misc_feature 94, 95, 96, 97, 98, 99: n = A,T,C or G
gactggaagagcactgttaaaacgaccaaataataccgaacataagttggaggctcatcgttcctattcaggcagatgttatcgaggtccgacnnnnnntatccccctttcccaatccctacctccgatcggatacgcatgaggct

SEQ ID NO: 707 - DNA, 146 bp, Artificial Sequence
  Bisulfite Padlock Probe
  misc_feature 92, 93, 94, 95, 96, 97: n = A,T,C or G
gactggaagagcactgttaaaacgacgacaacgataacgccacgttggaggctcatcgttcctattcaggcagatgttatcgaggtccgacnnnnnntacctcaaacattcccaaaacaattaaaagatcggatacgcatgaggct

SEQ ID NO: 708 - DNA, 146 bp, Artificial Sequence
  Bisulfite Padlock Probe
  misc_feature 92, 93, 94, 95, 96, 97: n = A,T,C or G
gactggaagagcactgttaaaacgacgacaacgataacgccgcgttggaggctcatcgttcctattcaggcagatgttatcgaggtccgacnnnnnntacctcgaacattcccaaaacaattaaaagatcggatacgcatgaggct

SEQ ID NO: 709 - DNA, 146 bp, Artificial Sequence
  Bisulfite Padlock Probe
  misc_feature 95, 96, 97, 98, 99, 100: n = A,T,C or G
gactggaagagcactgttaaaacgactaaacaacgcgaacaactctgttggaggctcatcgttcctattcaggcagatgttatcgaggtccgacnnnnnnacccccgcaaaataaaacgacaaacagatcggatacgcatgaggct

SEQ ID NO: 710 - DNA, 146 bp, Artificial Sequence
  Bisulfite Padlock Probe
  misc_feature 95, 96, 97, 98, 99, 100: n = A,T,C or G
gactggaagagcactgttaaaacgactaaacaacgcgaacgactctgttggaggctcatcgttcctattcaggcagatgttatcgaggtccgacnnnnnnacccccgcaaaataaaacgacgaacagatcggatacgcatgaggct

SEQ ID NO: 711 - DNA, 146 bp, Artificial Sequence
  Bisulfite Padlock Probe
  misc_feature 95, 96, 97, 98, 99, 100: n = A,T,C or G
gactggaagagcactgttaaaacgataacgaccaaactcaaaacacgttggaggctcatcgttcctattcaggcagatgttatcgaggtccgacnnnnnnaaaaccacatttccactcaaaacaacgatcggatacgcatgaggct

SEQ ID NO: 712 - DNA, 146 bp, Artificial Sequence
  Bisulfite Padlock Probe
  misc_feature 95, 96, 97, 98, 99, 100: n = A,T,C or G
gactggaagagcactgttaaaacgataacgaccgaactcaaaacacgttggaggctcatcgttcctattcaggcagatgttatcgaggtccgacnnnnnnaaaaccgcatttccactcaaaacaacgatcggatacgcatgaggct

SEQ ID NO: 713 - DNA, 146 bp, Artificial Sequence
  Bisulfite Padlock Probe
  misc_feature 92, 93, 94, 95, 96, 97: n = A,T,C or G
gactggaagagcactgttaaaacgatcccccatattcataatagttggaggctcatcgttcctattcaggcagatgttatcgaggtccgacnnnnnncaaaacaaaaccccgaataacacttactagatcggatacgcatgaggct

SEQ ID NO: 714 - DNA, 146 bp, Artificial Sequence
  Bisulfite Padlock Probe
  misc_feature 92, 93, 94, 95, 96, 97: n = A,T,C or G
gactggaagagcactgttaaaacgcaaaaacccctaaaacaacgttggaggctcatcgttcctattcaggcagatgttatcgaggtccgacnnnnnnctcttaatcccgaatacattatctttaatgatcggatacgcatgaggct

SEQ ID NO: 715 - DNA, 146 bp, Artificial Sequence
  Bisulfite Padlock Probe
  misc_feature 92, 93, 94, 95, 96, 97: n = A,T,C or G
gactggaagagcactgttaaaacgcaaaaacccctaaaacgacgttggaggctcatcgttcctattcaggcagatgttatcgaggtccgacnnnnnnctcttaatcccgaatacgttatctttaatgatcggatacgcatgaggct

SEQ ID NO: 716 - DNA, 146 bp, Artificial Sequence
  Bisulfite Padlock Probe
  misc_feature 93, 94, 95, 96, 97, 98: n = A,T,C or G
gactggaagagcactgttaaaacgcaaacgacacaacaacaaacgttggaggctcatcgttcctattcaggcagatgttatcgaggtccgacnnnnnnaactaaaacgccccactcttctcctctagatcggatacgcatgaggct

SEQ ID NO: 717 - DNA, 146 bp, Artificial Sequence
  Bisulfite Padlock Probe
  misc_feature 93, 94, 95, 96, 97, 98: n = A,T,C or G
gactggaagagcactgttaaaacgcaaacgacgcaacaacaaacgttggaggctcatcgttcctattcaggcagatgttatcgaggtccgacnnnnnnaactaaaacgccccgctcttctcctctagatcggatacgcatgaggct

SEQ ID NO: 718 - DNA, 146 bp, Artificial Sequence
  Bisulfite Padlock Probe
  misc_feature 92, 93, 94, 95, 96, 97: n = A,T,C or G
gactggaagagcactgttaaaacgcaccaaactattactaaccgttggaggctcatcgttcctattcaggcagatgttatcgaggtccgacnnnnnnattcccatcaaaaactcttctctcaatccgatcggatacgcatgaggct

SEQ ID NO: 719 - DNA, 146 bp, Artificial Sequence
  Bisulfite Padlock Probe
  misc_feature 92, 93, 94, 95, 96, 97: n = A,T,C or G
gactggaagagcactgttaaaacgcaccgaactattactaaccgttggaggctcatcgttcctattcaggcagatgttatcgaggtccgacnnnnnnattcccatcaaaaactcttctctcaatccgatcggatacgcatgaggct

SEQ ID NO: 720 - DNA, 146 bp, Artificial Sequence
  Bisulfite Padlock Probe
  misc_feature 92, 93, 94, 95, 96, 97: n = A,T,C or G
gactggaagagcactgttaaaacgcacgaaccacccattattcgttggaggctcatcgttcctattcaggcagatgttatcgaggtccgacnnnnnncacaataaacccgatcgctaaaacacacagatcggatacgcatgaggct

SEQ ID NO: 721 - DNA, 146 bp, Artificial Sequence
  Bisulfite Padlock Probe
  misc_feature 92, 93, 94, 95, 96, 97: n = A,T,C or G
gactggaagagcactgttaaaacgcacgaaccgcccattattcgttggaggctcatcgttcctattcaggcagatgttatcgaggtccgacnnnnnncacaataaacccgatcgctaaaacgcacagatcggatacgcatgaggct

SEQ ID NO: 722 - DNA, 146 bp, Artificial Sequence
  Bisulfite Padlock Probe
  misc_feature 93, 94, 95, 96, 97, 98: n = A,T,C or G
gactggaagagcactgttaaaacgccccctaaacaaataaacacgttggaggctcatcgttcctattcaggcagatgttatcgaggtccgacnnnnnnaaaaccgcaatacgaccgacgctaaaacgatcggatacgcatgaggct

SEQ ID NO: 723 - DNA, 146 bp, Artificial Sequence
  Bisulfite Padlock Probe
  misc_feature 95, 96, 97, 98, 99, 100: n = A,T,C or G
gactggaagagcactgttaaaacgccgtaaaacgcgaaacataaaagttggaggctcatcgttcctattcaggcagatgttatcgaggtccgacnnnnnnctacttaaaatttaaaataacgcaacgatcggatacgcatgaggct

SEQ ID NO: 724 - DNA, 146 bp, Artificial Sequence
  Bisulfite Padlock Probe
  misc_feature 95, 96, 97, 98, 99, 100: n = A,T,C or G
gactggaagagcactgttaaaacgccgtaaaacgcgaaacgtaaaagttggaggctcatcgttcctattcaggcagatgttatcgaggtccgacnnnnnnctacttaaaatttaaaataacgcgacgatcggatacgcatgaggct

SEQ ID NO: 725 - DNA, 146 bp, Artificial Sequence
  Bisulfite Padlock Probe
  misc_feature 92, 93, 94, 95, 96, 97: n = A,T,C or G
gactggaagagcactgttaaaacgcgaactacgaacgcactacgttggaggctcatcgttcctattcaggcagatgttatcgaggtccgacnnnnnnccactaccctttccttaacaaccctaaacgatcggatacgcatgaggct

SEQ ID NO: 726 - DNA, 146 bp, Artificial Sequence
  Bisulfite Padlock Probe
  misc_feature 92, 93, 94, 95, 96, 97: n = A,T,C or G
gactggaagagcactgttaaaacgcgaactacgaacgcgctacgttggaggctcatcgttcctattcaggcagatgttatcgaggtccgacnnnnnnccactaccctttccttaacgaccctaaacgatcggatacgcatgaggct

SEQ ID NO: 727 - DNA, 146 bp, Artificial Sequence
  Bisulfite Padlock Probe
  misc_feature 94, 95, 96, 97, 98, 99: n = A,T,C or G
gactggaagagcactgttaaaacgcgcctactaccattccaaaaagttggaggctcatcgttcctattcaggcagatgttatcgaggtccgacnnnnnnaaaaacgaataacccccaacgaacaacgatcggatacgcatgaggct

SEQ ID NO: 728 - DNA, 146 bp, Artificial Sequence
  Bisulfite Padlock Probe
  misc_feature 94, 95, 96, 97, 98, 99: n = A,T,C or G
gactggaagagcactgttaaaacgcgcctactaccgttccaaaaagttggaggctcatcgttcctattcaggcagatgttatcgaggtccgacnnnnnnaaaaacgaataacccccaacgaacgacgatcggatacgcatgaggct

SEQ ID NO: 729 - DNA, 146 bp, Artificial Sequence
  Bisulfite Padlock Probe
  misc_feature 93, 94, 95, 96, 97, 98: n = A,T,C or G
gactggaagagcactgttaaaacgcgctcacttctcttcaaaaagttggaggctcatcgttcctattcaggcagatgttatcgaggtccgacnnnnnnaacaaaactttcttctcccatctaactagatcggatacgcatgaggct

SEQ ID NO: 730 - DNA, 146 bp, Artificial Sequence
  Bisulfite Padlock Probe
  misc_feature 93, 94, 95, 96, 97, 98: n = A,T,C or G
gactggaagagcactgttaaaacgcgctcgcttctcttcaaaaagttggaggctcatcgttcctattcaggcagatgttatcgaggtccgacnnnnnnaacaaaactttcttctcccgtctaactagatcggatacgcatgaggct

SEQ ID NO: 731 - DNA, 146 bp, Artificial Sequence
  Bisulfite Padlock Probe
  misc_feature 92, 93, 94, 95, 96, 97: n = A,T,C or G
gactggaagagcactgttaaaacgctatccccaacataaacacgttggaggctcatcgttcctattcaggcagatgttatcgaggtccgacnnnnnnaaaaacttaaaacaaacacaaccaatacagatcggatacgcatgaggct

SEQ ID NO: 732 - DNA, 146 bp, Artificial Sequence
  Bisulfite Padlock Probe
  misc_feature 92, 93, 94, 95, 96, 97: n = A,T,C or G
gactggaagagcactgttaaaacgctatccccaacataaacgcgttggaggctcatcgttcctattcaggcagatgttatcgaggtccgacnnnnnnaaaaacttaaaacaaacgcaaccaatacagatcggatacgcatgaggct

SEQ ID NO: 733 - DNA, 146 bp, Artificial Sequence
  Bisulfite Padlock Probe
  misc_feature 93, 94, 95, 96, 97, 98: n = A,T,C or G
gactggaagagcactgttaaaacgctatctaaacaactcaaaacgttggaggctcatcgttcctattcaggcagatgttatcgaggtccgacnnnnnnccaaacgcgaccgaaacgaacataaaaagatcggatacgcatgaggct

SEQ ID NO: 734 - DNA, 146 bp, Artificial Sequence
  Bisulfite Padlock Probe
  misc_feature 93, 94, 95, 96, 97, 98: n = A,T,C or G
gactggaagagcactgttaaaacgctatctaaacaactcgaaacgttggaggctcatcgttcctattcaggcagatgttatcgaggtccgacnnnnnnccaaacgcgaccgaaacgaacgtaaaaagatcggatacgcatgaggct

SEQ ID NO: 735 - DNA, 146 bp, Artificial Sequence
  Bisulfite Padlock Probe
  misc_feature 96, 97, 98, 99, 100, 101: n = A,T,C or G
gactggaagagcactgttaaaacgtaaacaaacttaatatccaaaaagttggaggctcatcgttcctattcaggcagatgttatcgaggtccgacnnnnnnaaaaaccgaaaccgccgacgaaaccgatcggatacgcatgaggct

SEQ ID NO: 736 - DNA, 146 bp, Artificial Sequence
  Bisulfite Padlock Probe
  misc_feature 94, 95, 96, 97, 98, 99: n = A,T,C or G
gactggaagagcactgttaaaacgtaaccaaaacccaaaaaccccgttggaggctcatcgttcctattcaggcagatgttatcgaggtccgacnnnnnnaaacccgctctcactaactctccctccgatcggatacgcatgaggct

SEQ ID NO: 737 - DNA, 146 bp, Artificial Sequence
  Bisulfite Padlock Probe
  misc_feature 96, 97, 98, 99, 100, 101: n = A,T,C or G
gactggaagagcactgttaaaacgtctcctcccaaatacaaactaaagttggaggctcatcgttcctattcaggcagatgttatcgaggtccgacnnnnnnaaaaatctaaaatcctcctcaaaaagatcggatacgcatgaggct

SEQ ID NO: 738 - DNA, 146 bp, Artificial Sequence
  Bisulfite Padlock Probe
  misc_feature 96, 97, 98, 99, 100, 101: n = A,T,C or G
gactggaagagcactgttaaaacgtctcctcccgaatacaaactaaagttggaggctcatcgttcctattcaggcagatgttatcgaggtccgacnnnnnnaaaaatctaaaatcctcctcaaaaagatcggatacgcatgaggct

SEQ ID NO: 739 - DNA, 146 bp, Artificial Sequence
  Bisulfite Padlock Probe
  misc_feature 95, 96, 97, 98, 99, 100: n = A,T,C or G
gactggaagagcactgttaaaacgttcacaacaacaaccccctctagttggaggctcatcgttcctattcaggcagatgttatcgaggtccgacnnnnnnaaaaaccgatttctctctcactatccgatcggatacgcatgaggct

SEQ ID NO: 740 - DNA, 146 bp, Artificial Sequence
  Bisulfite Padlock Probe
  misc_feature 95, 96, 97, 98, 99, 100: n = A,T,C or G
gactggaagagcactgttaaaacgttcacgacaacaaccccctctagttggaggctcatcgttcctattcaggcagatgttatcgaggtccgacnnnnnnaaaaaccgatttctctctcgctatccgatcggatacgcatgaggct

SEQ ID NO: 741 - DNA, 146 bp, Artificial Sequence
  Bisulfite Padlock Probe
  misc_feature 96, 97, 98, 99, 100, 101: n = A,T,C or G
gactggaagagcactgttaaaactaaaaataaaataatccccactacgttggaggctcatcgttcctattcaggcagatgttatcgaggtccgacnnnnnnaacccctaaacgacgtcaccaaaaagatcggatacgcatgaggct

SEQ ID NO: 742 - DNA, 146 bp, Artificial Sequence
  Bisulfite Padlock Probe
  misc_feature 96, 97, 98, 99, 100, 101: n = A,T,C or G
gactggaagagcactgttaaaactaaaaataaaataatccccactacgttggaggctcatcgttcctattcaggcagatgttatcgaggtccgacnnnnnnaacccctaaacgacgtcgccaaaaagatcggatacgcatgaggct

SEQ ID NO: 743 - DNA, 146 bp, Artificial Sequence
  Bisulfite Padlock Probe
  misc_feature 92, 93, 94, 95, 96, 97: n = A,T,C or G
gactggaagagcactgttaaaactaaaacgaaaacaaaacaaagttggaggctcatcgttcctattcaggcagatgttatcgaggtccgacnnnnnnaatatcttcttcctaaactaccttctcccgatcggatacgcatgaggct

SEQ ID NO: 744 - DNA, 146 bp, Artificial Sequence
  Bisulfite Padlock Probe
  misc_feature 92, 93, 94, 95, 96, 97: n = A,T,C or G
gactggaagagcactgttaaaactaaaacgaaaacgaaacaaagttggaggctcatcgttcctattcaggcagatgttatcgaggtccgacnnnnnnaatatcttcttcctaaactaccttctcccgatcggatacgcatgaggct

SEQ ID NO: 745 - DNA, 146 bp, Artificial Sequence
  Bisulfite Padlock Probe
  misc_feature 92, 93, 94, 95, 96, 97: n = A,T,C or G
gactggaagagcactgttaaaactaaaacgacgcaaactaaccgttggaggctcatcgttcctattcaggcagatgttatcgaggtccgacnnnnnnaaaacctcgacattataaaaacacctaaagatcggatacgcatgaggct

SEQ ID NO: 746 - DNA, 146 bp, Artificial Sequence
  Bisulfite Padlock Probe
  misc_feature 92, 93, 94, 95, 96, 97: n = A,T,C or G
gactggaagagcactgttaaaactaaaacgacgcgaactaaccgttggaggctcatcgttcctattcaggcagatgttatcgaggtccgacnnnnnnaaaacctcgacgttataaaaacacctaaagatcggatacgcatgaggct

SEQ ID NO: 747 - DNA, 146 bp, Artificial Sequence
  Bisulfite Padlock Probe
  misc_feature 92, 93, 94, 95, 96, 97: n = A,T,C or G
gactggaagagcactgttaaaactaaaccgcaacaccctccacgttggaggctcatcgttcctattcaggcagatgttatcgaggtccgacnnnnnnctaaaaactcttcctttcaccaacacaaagatcggatacgcatgaggct

SEQ ID NO: 748 - DNA, 146 bp, Artificial Sequence
  Bisulfite Padlock Probe
  misc_feature 92, 93, 94, 95, 96, 97: n = A,T,C or G
gactggaagagcactgttaaaactaaaccgcaacaccctccgcgttggaggctcatcgttcctattcaggcagatgttatcgaggtccgacnnnnnnctaaaaactcttcctttcaccgacacaaagatcggatacgcatgaggct

SEQ ID NO: 749 - DNA, 146 bp, Artificial Sequence
  Bisulfite Padlock Probe
  misc_feature 92, 93, 94, 95, 96, 97: n = A,T,C or G
gactggaagagcactgttaaaactaaacgaaaccccgcaacccgttggaggctcatcgttcctattcaggcagatgttatcgaggtccgacnnnnnnaatttataaaccaaaaccaaaatatccccgatcggatacgcatgaggct

SEQ ID NO: 750 - DNA, 146 bp, Artificial Sequence
  Bisulfite Padlock Probe
  misc_feature 92, 93, 94, 95, 96, 97: n = A,T,C or G
gactggaagagcactgttaaaactaaacgaaaccccgcgacccgttggaggctcatcgttcctattcaggcagatgttatcgaggtccgacnnnnnnaatttataaaccgaaaccaaaatatccccgatcggatacgcatgaggct

SEQ ID NO: 751 - DNA, 146 bp, Artificial Sequence
  Bisulfite Padlock Probe
  misc_feature 92, 93, 94, 95, 96, 97: n = A,T,C or G
gactggaagagcactgttaaaactaaataacaataaccaaaccgttggaggctcatcgttcctattcaggcagatgttatcgaggtccgacnnnnnnattttctcacacttataactaaatctaatgatcggatacgcatgaggct

SEQ ID NO: 752 - DNA, 146 bp, Artificial Sequence
  Bisulfite Padlock Probe
  misc_feature 92, 93, 94, 95, 96, 97: n = A,T,C or G
gactggaagagcactgttaaaactaaataacgataaccaaaccgttggaggctcatcgttcctattcaggcagatgttatcgaggtccgacnnnnnnattttctcgcacttataactaaatctaatgatcggatacgcatgaggct

SEQ ID NO: 753 - DNA, 146 bp, Artificial Sequence
  Bisulfite Padlock Probe
  misc_feature 92, 93, 94, 95, 96, 97: n = A,T,C or G
gactggaagagcactgttaaaactaaccctacaacaactaaacgttggaggctcatcgttcctattcaggcagatgttatcgaggtccgacnnnnnnaaaaactcaccttctaaaacatcgacaaagatcggatacgcatgaggct

SEQ ID NO: 754 - DNA, 146 bp, Artificial Sequence
  Bisulfite Padlock Probe
  misc_feature 92, 93, 94, 95, 96, 97: n = A,T,C or G
gactggaagagcactgttaaaactaaccctacaacgactaaacgttggaggctcatcgttcctattcaggcagatgttatcgaggtccgacnnnnnnaaaaactcaccttctaaaacatcgacgaagatcggatacgcatgaggct

SEQ ID NO: 755 - DNA, 146 bp, Artificial Sequence
  Bisulfite Padlock Probe
  misc_feature 92, 93, 94, 95, 96, 97: n = A,T,C or G
gactggaagagcactgttaaaactaatattcgcataaacccacgttggaggctcatcgttcctattcaggcagatgttatcgaggtccgacnnnnnnaaaaactccgaaatcctcacctaatcctagatcggatacgcatgaggct

SEQ ID NO: 756 - DNA, 146 bp, Artificial Sequence
  Bisulfite Padlock Probe
  misc_feature 92, 93, 94, 95, 96, 97: n = A,T,C or G
gactggaagagcactgttaaaactaatattcgcgtaaacccacgttggaggctcatcgttcctattcaggcagatgttatcgaggtccgacnnnnnnaaaaactccgaaatcctcgcctaatcctagatcggatacgcatgaggct

SEQ ID NO: 757 - DNA, 146 bp, Artificial Sequence
  Bisulfite Padlock Probe
  misc_feature 92, 93, 94, 95, 96, 97: n = A,T,C or G
gactggaagagcactgttaaaactaatctaacttaactaaaccgttggaggctcatcgttcctattcaggcagatgttatcgaggtccgacnnnnnnacaaaatccgtaaacaaaattccaataacgatcggatacgcatgaggct

SEQ ID NO: 758 - DNA, 146 bp, Artificial Sequence
  Bisulfite Padlock Probe
  misc_feature 92, 93, 94, 95, 96, 97: n = A,T,C or G
gactggaagagcactgttaaaactaatctaacttaactaaaccgttggaggctcatcgttcctattcaggcagatgttatcgaggtccgacnnnnnnacaaaatccgtaaacgaaattccaataacgatcggatacgcatgaggct

SEQ ID NO: 759 - DNA, 146 bp, Artificial Sequence
  Bisulfite Padlock Probe
  misc_feature 96, 97, 98, 99, 100, 101: n = A,T,C or G
gactggaagagcactgttaaaactacaaatcccaaaacaaaaactacgttggaggctcatcgttcctattcaggcagatgttatcgaggtccgacnnnnnntcccccactctcatctcctcaacccgatcggatacgcatgaggct

SEQ ID NO: 760 - DNA, 146 bp, Artificial Sequence
  Bisulfite Padlock Probe
  misc_feature 96, 97, 98, 99, 100, 101: n = A,T,C or G
gactggaagagcactgttaaaactacaaatcccaaaacgaaaactacgttggaggctcatcgttcctattcaggcagatgttatcgaggtccgacnnnnnntcccccactctcatctcctcaacccgatcggatacgcatgaggct

SEQ ID NO: 761 - DNA, 146 bp, Artificial Sequence
  Bisulfite Padlock Probe
  misc_feature 92, 93, 94, 95, 96, 97: n = A,T,C or G
gactggaagagcactgttaaaactacacaaatctccccaaaacgttggaggctcatcgttcctattcaggcagatgttatcgaggtccgacnnnnnnttaacaccgcaacactcaactaacctctcgatcggatacgcatgaggct

SEQ ID NO: 762 - DNA, 146 bp, Artificial Sequence
  Bisulfite Padlock Probe
  misc_feature 92, 93, 94, 95, 96, 97: n = A,T,C or G
gactggaagagcactgttaaaactacacaaatctccccaaaacgttggaggctcatcgttcctattcaggcagatgttatcgaggtccgacnnnnnnttaacaccgcaacactcgactaacctctcgatcggatacgcatgaggct

SEQ ID NO: 763 - DNA, 146 bp, Artificial Sequence
  Bisulfite Padlock Probe
  misc_feature 96, 97, 98, 99, 100, 101: n = A,T,C or G
gactggaagagcactgttaaaactacacccctccccaattttaaaaagttggaggctcatcgttcctattcaggcagatgttatcgaggtccgacnnnnnnaaaaaccactaaaattatctcctccgatcggatacgcatgaggct

SEQ ID NO: 764 - DNA, 146 bp, Artificial Sequence
  Bisulfite Padlock Probe
  misc_feature 96, 97, 98, 99, 100, 101: n = A,T,C or G
gactggaagagcactgttaaaactacacccctccccgattttaaaaagttggaggctcatcgttcctattcaggcagatgttatcgaggtccgacnnnnnnaaaaaccgctaaaattatctcctccgatcggatacgcatgaggct

SEQ ID NO: 765 - DNA, 146 bp, Artificial Sequence
  Bisulfite Padlock Probe
  misc_feature 92, 93, 94, 95, 96, 97: n = A,T,C or G
gactggaagagcactgttaaaactacactataataactaaaccgttggaggctcatcgttcctattcaggcagatgttatcgaggtccgacnnnnnncaacttaataaacctaaataacccctaccgatcggatacgcatgaggct

SEQ ID NO: 766 - DNA, 146 bp, Artificial Sequence
  Bisulfite Padlock Probe
  misc_feature 93, 94, 95, 96, 97, 98: n = A,T,C or G
gactggaagagcactgttaaaactacgaaaacgacaaaaataacgttggaggctcatcgttcctattcaggcagatgttatcgaggtccgacnnnnnnaatctttaaatttctttatatttccccagatcggatacgcatgaggct

SEQ ID NO: 767 - DNA, 146 bp, Artificial Sequence
  Bisulfite Padlock Probe
  misc_feature 93, 94, 95, 96, 97, 98: n = A,T,C or G
gactggaagagcactgttaaaactacgaaaacgacgaaaataacgttggaggctcatcgttcctattcaggcagatgttatcgaggtccgacnnnnnnaatctttaaatttctttatatttccccagatcggatacgcatgaggct

SEQ ID NO: 768 - DNA, 146 bp, Artificial Sequence
  Bisulfite Padlock Probe
  misc_feature 92, 93, 94, 95, 96, 97: n = A,T,C or G
gactggaagagcactgttaaaactacgctataataactaaaccgttggaggctcatcgttcctattcaggcagatgttatcgaggtccgacnnnnnncaacttaataaacctaaataacccctaccgatcggatacgcatgaggct

SEQ ID NO: 769 - DNA, 146 bp, Artificial Sequence
  Bisulfite Padlock Probe
  misc_feature 95, 96, 97, 98, 99, 100: n = A,T,C or G
gactggaagagcactgttaaaactactatttcccaactacataaatgttggaggctcatcgttcctattcaggcagatgttatcgaggtccgacnnnnnnctccccgccaacaaccaaaacaaaaagatcggatacgcatgaggct

SEQ ID NO: 770 - DNA, 146 bp, Artificial Sequence
  Bisulfite Padlock Probe
  misc_feature 95, 96, 97, 98, 99, 100: n = A,T,C or G
gactggaagagcactgttaaaactactatttcccaactacataaatgttggaggctcatcgttcctattcaggcagatgttatcgaggtccgacnnnnnnctccccgccgacaaccaaaacaaaaagatcggatacgcatgaggct

SEQ ID NO: 771 - DNA, 146 bp, Artificial Sequence
  Bisulfite Padlock Probe
  misc_feature 95, 96, 97, 98, 99, 100: n = A,T,C or G
gactggaagagcactgttaaaactataaactactaaacactaaaaagttggaggctcatcgttcctattcaggcagatgttatcgaggtccgacnnnnnnaataaaacgcaaccaacaaccaaaccgatcggatacgcatgaggct

SEQ ID NO: 772 - DNA, 146 bp, Artificial Sequence
  Bisulfite Padlock Probe
  misc_feature 95, 96, 97, 98, 99, 100: n = A,T,C or G
gactggaagagcactgttaaaactataaactactaaacgctaaaaagttggaggctcatcgttcctattcaggcagatgttatcgaggtccgacnnnnnnaataaaacgcaaccaacgaccaaaccgatcggatacgcatgaggct

SEQ ID NO: 773 - DNA, 146 bp, Artificial Sequence
  Bisulfite Padlock Probe
  misc_feature 92, 93, 94, 95, 96, 97: n = A,T,C or G
gactggaagagcactgttaaaactatacaaaactaaaaactccgttggaggctcatcgttcctattcaggcagatgttatcgaggtccgacnnnnnnaaaaatctcaataccaaacgactccatatgatcggatacgcatgaggct

SEQ ID NO: 774 - DNA, 146 bp, Artificial Sequence
  Bisulfite Padlock Probe
  misc_feature 92, 93, 94, 95, 96, 97: n = A,T,C or G
gactggaagagcactgttaaaactatacgaaactaaaaactccgttggaggctcatcgttcctattcaggcagatgttatcgaggtccgacnnnnnnaaaaatctcaataccaaacgactccgtatgatcggatacgcatgaggct

SEQ ID NO: 775 - DNA, 146 bp, Artificial Sequence
  Bisulfite Padlock Probe
  misc_feature 94, 95, 96, 97, 98, 99: n = A,T,C or G
gactggaagagcactgttaaaactccaaacaccccgaccaaaaacgttggaggctcatcgttcctattcaggcagatgttatcgaggtccgacnnnnnnctaccgccgaaccctacaaccaataacgatcggatacgcatgaggct

SEQ ID NO: 776 - DNA, 146 bp, Artificial Sequence
  Bisulfite Padlock Probe
  misc_feature 94, 95, 96, 97, 98, 99: n = A,T,C or G
gactggaagagcactgttaaaactccaaacaccccgaccgaaaacgttggaggctcatcgttcctattcaggcagatgttatcgaggtccgacnnnnnnctaccgccgaaccctacgaccaataacgatcggatacgcatgaggct

SEQ ID NO: 777 - DNA, 146 bp, Artificial Sequence
  Bisulfite Padlock Probe
  misc_feature 94, 95, 96, 97, 98, 99: n = A,T,C or G
gactggaagagcactgttaaaactccgaaacaatataaataaaaagttggaggctcatcgttcctattcaggcagatgttatcgaggtccgacnnnnnntacctaaacaacaaactctacaaccccgatcggatacgcatgaggct

SEQ ID NO: 778 - DNA, 146 bp, Artificial Sequence
  Bisulfite Padlock Probe
  misc_feature 94, 95, 96, 97, 98, 99: n = A,T,C or G
gactggaagagcactgttaaaactccgaaacgatataaataaaaagttggaggctcatcgttcctattcaggcagatgttatcgaggtccgacnnnnnntacctaaacaacgaactctacaaccccgatcggatacgcatgaggct

SEQ ID NO: 779 - DNA, 146 bp, Artificial Sequence
  Bisulfite Padlock Probe
  misc_feature 92, 93, 94, 95, 96, 97: n = A,T,C or G
gactggaagagcactgttaaaactccgaacaacaaaaattcctgttggaggctcatcgttcctattcaggcagatgttatcgaggtccgacnnnnnntcctccccaataaaatacaatctaaaattgatcggatacgcatgaggct

SEQ ID NO: 780 - DNA, 146 bp, Artificial Sequence
  Bisulfite Padlock Probe
  misc_feature 92, 93, 94, 95, 96, 97: n = A,T,C or G
gactggaagagcactgttaaaactccgaacgacaaaaattcctgttggaggctcatcgttcctattcaggcagatgttatcgaggtccgacnnnnnntcctccccaataaaatacaatctaaaattgatcggatacgcatgaggct

SEQ ID NO: 781 - DNA, 146 bp, Artificial Sequence
  Bisulfite Padlock Probe
  misc_feature 95, 96, 97, 98, 99, 100: n = A,T,C or G
gactggaagagcactgttaaaactccgtacaaaatcaaaatctaaagttggaggctcatcgttcctattcaggcagatgttatcgaggtccgacnnnnnnaaaaactcaactatctcctcaaaatcgatcggatacgcatgaggct

SEQ ID NO: 782 - DNA, 146 bp, Artificial Sequence
  Bisulfite Padlock Probe
  misc_feature 95, 96, 97, 98, 99, 100: n = A,T,C or G
gactggaagagcactgttaaaactccgtacaaaatcgaaatctaaagttggaggctcatcgttcctattcaggcagatgttatcgaggtccgacnnnnnnaaaaactcaactatctcctcgaaatcgatcggatacgcatgaggct

SEQ ID NO: 783 - DNA, 146 bp, Artificial Sequence
  Bisulfite Padlock Probe
  misc_feature 92, 93, 94, 95, 96, 97: n = A,T,C or G
gactggaagagcactgttaaaactcctaccaaccccaacccccgttggaggctcatcgttcctattcaggcagatgttatcgaggtccgacnnnnnnttccaatcacatttatcttacaaacgacagatcggatacgcatgaggct

SEQ ID NO: 784 - DNA, 146 bp, Artificial Sequence
  Bisulfite Padlock Probe
  misc_feature 96, 97, 98, 99, 100, 101: n = A,T,C or G
gactggaagagcactgttaaaactccttctctctccccaactttcctgttggaggctcatcgttcctattcaggcagatgttatcgaggtccgacnnnnnnaacactaaacttaatccaaaacctcgatcggatacgcatgaggct

SEQ ID NO: 785 - DNA, 146 bp, Artificial Sequence
  Bisulfite Padlock Probe
  misc_feature 94, 95, 96, 97, 98, 99: n = A,T,C or G
gactggaagagcactgttaaaactcgaacaccaacaccttaaaaagttggaggctcatcgttcctattcaggcagatgttatcgaggtccgacnnnnnnaaaaacccgaaaaaccgacacttccttgatcggatacgcatgaggct

SEQ ID NO: 786 - DNA, 146 bp, Artificial Sequence
  Bisulfite Padlock Probe
  misc_feature 94, 95, 96, 97, 98, 99: n = A,T,C or G
gactggaagagcactgttaaaactcgaacaccgacaccttaaaaagttggaggctcatcgttcctattcaggcagatgttatcgaggtccgacnnnnnnaaaaacccgaaaaaccgacgcttccttgatcggatacgcatgaggct

SEQ ID NO: 787 - DNA, 146 bp, Artificial Sequence
  Bisulfite Padlock Probe
  misc_feature 92, 93, 94, 95, 96, 97: n = A,T,C or G
gactggaagagcactgttaaaactcgctccttccgaaccacatgttggaggctcatcgttcctattcaggcagatgttatcgaggtccgacnnnnnncctaactacaaccctctacaaccctacttgatcggatacgcatgaggct

SEQ ID NO: 788 - DNA, 146 bp, Artificial Sequence
  Bisulfite Padlock Probe
  misc_feature 92, 93, 94, 95, 96, 97: n = A,T,C or G
gactggaagagcactgttaaaactcgctccttccgaaccgcatgttggaggctcatcgttcctattcaggcagatgttatcgaggtccgacnnnnnncctaactacaaccctctacaaccctacttgatcggatacgcatgaggct

SEQ ID NO: 789 - DNA, 146 bp, Artificial Sequence
  Bisulfite Padlock Probe
  misc_feature 95, 96, 97, 98, 99, 100: n = A,T,C or G
gactggaagagcactgttaaaactcgtacgaacacaccaactcctcgttggaggctcatcgttcctattcaggcagatgttatcgaggtccgacnnnnnnactcctaaacctcccaaactcatcccgatcggatacgcatgaggct

SEQ ID NO: 790 - DNA, 146 bp, Artificial Sequence
  Bisulfite Padlock Probe
  misc_feature 95, 96, 97, 98, 99, 100: n = A,T,C or G
gactggaagagcactgttaaaactcgtacgaacgcaccaactcctcgttggaggctcatcgttcctattcaggcagatgttatcgaggtccgacnnnnnnactcctaaacctcccaaactcgtcccgatcggatacgcatgaggct

SEQ ID NO: 791 - DNA, 146 bp, Artificial Sequence
  Bisulfite Padlock Probe
  misc_feature 95, 96, 97, 98, 99, 100: n = A,T,C or G
gactggaagagcactgttaaaactctaatcatttaactacaactaagttggaggctcatcgttcctattcaggcagatgttatcgaggtccgacnnnnnnacctctaaactatttctaaccaaaccgatcggatacgcatgaggct

SEQ ID NO: 792 - DNA, 146 bp, Artificial Sequence
  Bisulfite Padlock Probe
  misc_feature 95, 96, 97, 98, 99, 100: n = A,T,C or G
gactggaagagcactgttaaaactctaatcgtttaactacaactaagttggaggctcatcgttcctattcaggcagatgttatcgaggtccgacnnnnnnacctctaaactatttctaaccaaaccgatcggatacgcatgaggct

SEQ ID NO: 793 - DNA, 146 bp, Artificial Sequence
  Bisulfite Padlock Probe
  misc_feature 92, 93, 94, 95, 96, 97: n = A,T,C or G
gactggaagagcactgttaaaactctcccttaaaaacacaaacgttggaggctcatcgttcctattcaggcagatgttatcgaggtccgacnnnnnnattacgcgcaacttaaaacaaataaataagatcggatacgcatgaggct

SEQ ID NO: 794 - DNA, 146 bp, Artificial Sequence
  Bisulfite Padlock Probe
  misc_feature 92, 93, 94, 95, 96, 97: n = A,T,C or G
gactggaagagcactgttaaaactctcccttaaaaacgcaaacgttggaggctcatcgttcctattcaggcagatgttatcgaggtccgacnnnnnnattacgcgcgacttaaaacaaataaataagatcggatacgcatgaggct

SEQ ID NO: 795 - DNA, 146 bp, Artificial Sequence
  Bisulfite Padlock Probe
  misc_feature 94, 95, 96, 97, 98, 99: n = A,T,C or G
gactggaagagcactgttaaaacttaatatcacaaaccacaaaacgttggaggctcatcgttcctattcaggcagatgttatcgaggtccgacnnnnnncccccttcctcctccatcaacaacaaagatcggatacgcatgaggct

SEQ ID NO: 796 - DNA, 146 bp, Artificial Sequence
  Bisulfite Padlock Probe
  misc_feature 93, 94, 95, 96, 97, 98: n = A,T,C or G
gactggaagagcactgttaaaactttactcccatacaaccaaacgttggaggctcatcgttcctattcaggcagatgttatcgaggtccgacnnnnnnaattaataaaacaaataaaaacaaaaacgatcggatacgcatgaggct

SEQ ID NO: 797 - DNA, 146 bp, Artificial Sequence
  Bisulfite Padlock Probe
  misc_feature 93, 94, 95, 96, 97, 98: n = A,T,C or G
gactggaagagcactgttaaaactttactcccatacgaccaaacgttggaggctcatcgttcctattcaggcagatgttatcgaggtccgacnnnnnnaattaataaaacgaataaaaacaaaaacgatcggatacgcatgaggct

SEQ ID NO: 798 - DNA, 146 bp, Artificial Sequence
  Bisulfite Padlock Probe
  misc_feature 92, 93, 94, 95, 96, 97: n = A,T,C or G
gactggaagagcactgttaaaataaaaacaacaacaacaaaaagttggaggctcatcgttcctattcaggcagatgttatcgaggtccgacnnnnnnaatacaaatcaatctccatcatcatactagatcggatacgcatgaggct

SEQ ID NO: 799 - DNA, 146 bp, Artificial Sequence
  Bisulfite Padlock Probe
  misc_feature 92, 93, 94, 95, 96, 97: n = A,T,C or G
gactggaagagcactgttaaaataaaaacaacgacaacaaaaagttggaggctcatcgttcctattcaggcagatgttatcgaggtccgacnnnnnnaatacaaatcgatctccatcatcatactagatcggatacgcatgaggct

SEQ ID NO: 800 - DNA, 146 bp, Artificial Sequence
  Bisulfite Padlock Probe
  misc_feature 92, 93, 94, 95, 96, 97: n = A,T,C or G
gactggaagagcactgttaaaataaaaaccactccctccaaatgttggaggctcatcgttcctattcaggcagatgttatcgaggtccgacnnnnnnttaatctcgttcgaacctcaaaataatttgatcggatacgcatgaggct

SEQ ID NO: 801 - DNA, 146 bp, Artificial Sequence
  Bisulfite Padlock Probe
  misc_feature 92, 93, 94, 95, 96, 97: n = A,T,C or G
gactggaagagcactgttaaaataaaaaccactccctccgaatgttggaggctcatcgttcctattcaggcagatgttatcgaggtccgacnnnnnnttaatctcgttcgaacctcgaaataatttgatcggatacgcatgaggct

SEQ ID NO: 802 - DNA, 146 bp, Artificial Sequence
  Bisulfite Padlock Probe
  misc_feature 92, 93, 94, 95, 96, 97: n = A,T,C or G
gactggaagagcactgttaaaataaaaacccaaaccgacccacgttggaggctcatcgttcctattcaggcagatgttatcgaggtccgacnnnnnncctacgaaaacacacaccgaccaaataaagatcggatacgcatgaggct

SEQ ID NO: 803 - DNA, 146 bp, Artificial Sequence
  Bisulfite Padlock Probe
  misc_feature 92, 93, 94, 95, 96, 97: n = A,T,C or G
gactggaagagcactgttaaaataaaaacccaaaccgacccgcgttggaggctcatcgttcctattcaggcagatgttatcgaggtccgacnnnnnncctacgaaaacacacaccgaccgaataaagatcggatacgcatgaggct

SEQ ID NO: 804 - DNA, 146 bp, Artificial Sequence
  Bisulfite Padlock Probe
  misc_feature 95, 96, 97, 98, 99, 100: n = A,T,C or G
gactggaagagcactgttaaaataaaaaccgacgaatacccaaaccgttggaggctcatcgttcctattcaggcagatgttatcgaggtccgacnnnnnnaaaaccaaataaataaacaaaatcccgatcggatacgcatgaggct

SEQ ID NO: 805 - DNA, 146 bp, Artificial Sequence
  Bisulfite Padlock Probe
  misc_feature 95, 96, 97, 98, 99, 100: n = A,T,C or G
gactggaagagcactgttaaaataaaaaccgacgaatacccgaaccgttggaggctcatcgttcctattcaggcagatgttatcgaggtccgacnnnnnnaaaaccgaataaataaacaaaatcccgatcggatacgcatgaggct

SEQ ID NO: 806 - DNA, 146 bp, Artificial Sequence
  Bisulfite Padlock Probe
  misc_feature 95, 96, 97, 98, 99, 100: n = A,T,C or G
gactggaagagcactgttaaaataaaaataaaaacgaaaattacaagttggaggctcatcgttcctattcaggcagatgttatcgaggtccgacnnnnnnaaaaactttccgaatcctaaccaaacgatcggatacgcatgaggct

SEQ ID NO: 807 - DNA, 146 bp, Artificial Sequence
  Bisulfite Padlock Probe
  misc_feature 95, 96, 97, 98, 99, 100: n = A,T,C or G
gactggaagagcactgttaaaataaaaataaaaacgaaaattacgagttggaggctcatcgttcctattcaggcagatgttatcgaggtccgacnnnnnnaaaaactttccgaatcctaaccgaacgatcggatacgcatgaggct

SEQ ID NO: 808 - DNA, 146 bp, Artificial Sequence
  Bisulfite Padlock Probe
  misc_feature 92, 93, 94, 95, 96, 97: n = A,T,C or G
gactggaagagcactgttaaaataaaacaaatcaaaatactccgttggaggctcatcgttcctattcaggcagatgttatcgaggtccgacnnnnnnaaacaccaaccttccaaacccaaaaactcgatcggatacgcatgaggct

SEQ ID NO: 809 - DNA, 146 bp, Artificial Sequence
  Bisulfite Padlock Probe
  misc_feature 92, 93, 94, 95, 96, 97: n = A,T,C or G
gactggaagagcactgttaaaataaaaccaacaactcccaaacgttggaggctcatcgttcctattcaggcagatgttatcgaggtccgacnnnnnnaacctcaaactacccaatatcccaactacgatcggatacgcatgaggct

SEQ ID NO: 810 - DNA, 146 bp, Artificial Sequence
  Bisulfite Padlock Probe
  misc_feature 92, 93, 94, 95, 96, 97: n = A,T,C or G
gactggaagagcactgttaaaataaaaccgacaactcccaaacgttggaggctcatcgttcctattcaggcagatgttatcgaggtccgacnnnnnnaacctcaaactacccaatatcccaactacgatcggatacgcatgaggct

SEQ ID NO: 811 - DNA, 146 bp, Artificial Sequence
  Bisulfite Padlock Probe
  misc_feature 92, 93, 94, 95, 96, 97: n = A,T,C or G
gactggaagagcactgttaaaataaaacgaatcaaaatactccgttggaggctcatcgttcctattcaggcagatgttatcgaggtccgacnnnnnnaaacgccaaccttccaaacccaaaaactcgatcggatacgcatgaggct

SEQ ID NO: 812 - DNA, 146 bp, Artificial Sequence
  Bisulfite Padlock Probe
  misc_feature 96, 97, 98, 99, 100, 101: n = A,T,C or G
gactggaagagcactgttaaaataaaacttccaaccgcaactaaaaagttggaggctcatcgttcctattcaggcagatgttatcgaggtccgacnnnnnnacaaattcaccaatcctttttctccgatcggatacgcatgaggct

SEQ ID NO: 813 - DNA, 146 bp, Artificial Sequence
  Bisulfite Padlock Probe
  misc_feature 96, 97, 98, 99, 100, 101: n = A,T,C or G
gactggaagagcactgttaaaataaaacttccaaccgcgactaaaaagttggaggctcatcgttcctattcaggcagatgttatcgaggtccgacnnnnnnacaaattcaccgatcctttttctccgatcggatacgcatgaggct

SEQ ID NO: 814 - DNA, 146 bp, Artificial Sequence
  Bisulfite Padlock Probe
  misc_feature 92, 93, 94, 95, 96, 97: n = A,T,C or G
gactggaagagcactgttaaaataaacatacgcccacctttacgttggaggctcatcgttcctattcaggcagatgttatcgaggtccgacnnnnnncaccttcgcgctaaatacaacctcaaaacgatcggatacgcatgaggct

SEQ ID NO: 815 - DNA, 146 bp, Artificial Sequence
  Bisulfite Padlock Probe
  misc_feature 92, 93, 94, 95, 96, 97: n = A,T,C or G
gactggaagagcactgttaaaataaacatacgcccgcctttacgttggaggctcatcgttcctattcaggcagatgttatcgaggtccgacnnnnnncaccttcgcgctaaatacgacctcaaaacgatcggatacgcatgaggct

SEQ ID NO: 816 - DNA, 146 bp, Artificial Sequence
  Bisulfite Padlock Probe
  misc_feature 94, 95, 96, 97, 98, 99: n = A,T,C or G
gactggaagagcactgttaaaataaactacaccaaaatataaaacgttggaggctcatcgttcctattcaggcagatgttatcgaggtccgacnnnnnnctcctcctccttccccaattctaaaaagatcggatacgcatgaggct

SEQ ID NO: 817 - DNA, 146 bp, Artificial Sequence
  Bisulfite Padlock Probe
  misc_feature 96, 97, 98, 99, 100, 101: n = A,T,C or G
gactggaagagcactgttaaaataaatacactaaacgcgaacgacaagttggaggctcatcgttcctattcaggcagatgttatcgaggtccgacnnnnnnctcgaaacgaaaacgcacgcaaaacgatcggatacgcatgaggct

SEQ ID NO: 818 - DNA, 146 bp, Artificial Sequence
  Bisulfite Padlock Probe
  misc_feature 96, 97, 98, 99, 100, 101: n = A,T,C or G
gactggaagagcactgttaaaataaatacactaaacgcgaacgacgagttggaggctcatcgttcctattcaggcagatgttatcgaggtccgacnnnnnnctcgaaacgaaaacgcacgcgaaacgatcggatacgcatgaggct

SEQ ID NO: 819 - DNA, 146 bp, Artificial Sequence
  Bisulfite Padlock Probe
  misc_feature 95, 96, 97, 98, 99, 100: n = A,T,C or G
gactggaagagcactgttaaaataacaaattttaattaactaaaaagttggaggctcatcgttcctattcaggcagatgttatcgaggtccgacnnnnnnaaaaatcgatactcttccacacaatagatcggatacgcatgaggct

SEQ ID NO: 820 - DNA, 146 bp, Artificial Sequence
  Bisulfite Padlock Probe
  misc_feature 95, 96, 97, 98, 99, 100: n = A,T,C or G
gactggaagagcactgttaaaataacaaattttaattaactaaaaagttggaggctcatcgttcctattcaggcagatgttatcgaggtccgacnnnnnnaaaaatcgatactcttccacacgatagatcggatacgcatgaggct

SEQ ID NO: 821 - DNA, 146 bp, Artificial Sequence
  Bisulfite Padlock Probe
  misc_feature 93, 94, 95, 96, 97, 98: n = A,T,C or G
gactggaagagcactgttaaaataacacaaaaaccaaataaaaagttggaggctcatcgttcctattcaggcagatgttatcgaggtccgacnnnnnnctctacgccgccgacaacttcttaaatagatcggatacgcatgaggct

SEQ ID NO: 822 - DNA, 146 bp, Artificial Sequence
  Bisulfite Padlock Probe
  misc_feature 93, 94, 95, 96, 97, 98: n = A,T,C or G
gactggaagagcactgttaaaataacacccctaacaaaaacatagttggaggctcatcgttcctattcaggcagatgttatcgaggtccgacnnnnnnaaacttcatatttacaaaacaacctcccgatcggatacgcatgaggct

SEQ ID NO: 823 - DNA, 146 bp, Artificial Sequence
  Bisulfite Padlock Probe
  misc_feature 93, 94, 95, 96, 97, 98: n = A,T,C or G
gactggaagagcactgttaaaataacacccctaacaaaaacatagttggaggctcatcgttcctattcaggcagatgttatcgaggtccgacnnnnnnaaacttcgtatttacaaaacaacctcccgatcggatacgcatgaggct

SEQ ID NO: 824 - DNA, 146 bp, Artificial Sequence
  Bisulfite Padlock Probe
  misc_feature 93, 94, 95, 96, 97, 98: n = A,T,C or G
gactggaagagcactgttaaaataacacgaaaaccaaataaaaagttggaggctcatcgttcctattcaggcagatgttatcgaggtccgacnnnnnnctctacgccgccgacgacttcttaaatagatcggatacgcatgaggct

SEQ ID NO: 825 - DNA, 146 bp, Artificial Sequence
  Bisulfite Padlock Probe
  misc_feature 94, 95, 96, 97, 98, 99: n = A,T,C or G
gactggaagagcactgttaaaataacatttttctcctaaccttacgttggaggctcatcgttcctattcaggcagatgttatcgaggtccgacnnnnnnacaaaaaccgaaaatcccaccaatctcgatcggatacgcatgaggct

SEQ ID NO: 826 - DNA, 146 bp, Artificial Sequence
  Bisulfite Padlock Probe
  misc_feature 96, 97, 98, 99, 100, 101: n = A,T,C or G
gactggaagagcactgttaaaataacccatctctattcaaaaataaagttggaggctcatcgttcctattcaggcagatgttatcgaggtccgacnnnnnnttaaaacgaaatctcaacaaatcccgatcggatacgcatgaggct

SEQ ID NO: 827 - DNA, 146 bp, Artificial Sequence
  Bisulfite Padlock Probe
  misc_feature 92, 93, 94, 95, 96, 97: n = A,T,C or G
gactggaagagcactgttaaaataaccccgaaaacacgtacacgttggaggctcatcgttcctattcaggcagatgttatcgaggtccgacnnnnnnaccatcaaaacatcccaccttccctaatcgatcggatacgcatgaggct

SEQ ID NO: 828 - DNA, 146 bp, Artificial Sequence
  Bisulfite Padlock Probe
  misc_feature 92, 93, 94, 95, 96, 97: n = A,T,C or G
gactggaagagcactgttaaaataaccccgaaaacacgtacgcgttggaggctcatcgttcctattcaggcagatgttatcgaggtccgacnnnnnnaccatcaaaacatcccaccttccctaatcgatcggatacgcatgaggct

SEQ ID NO: 829 - DNA, 146 bp, Artificial Sequence
  Bisulfite Padlock Probe
  misc_feature 96, 97, 98, 99, 100, 101: n = A,T,C or G
gactggaagagcactgttaaaataacccgtctctattcaaaaataaagttggaggctcatcgttcctattcaggcagatgttatcgaggtccgacnnnnnnttaaaacgaaatctcaacgaatcccgatcggatacgcatgaggct

SEQ ID NO: 830 - DNA, 146 bp, Artificial Sequence
  Bisulfite Padlock Probe
  misc_feature 96, 97, 98, 99, 100, 101: n = A,T,C or G
gactggaagagcactgttaaaataacgaacaaaccgacctcaacccagttggaggctcatcgttcctattcaggcagatgttatcgaggtccgacnnnnnncttattaaacacctacaacacccccgatcggatacgcatgaggct

SEQ ID NO: 831 - DNA, 146 bp, Artificial Sequence
  Bisulfite Padlock Probe
  misc_feature 96, 97, 98, 99, 100, 101: n = A,T,C or G
gactggaagagcactgttaaaataacgaacaaaccgacctcgacccagttggaggctcatcgttcctattcaggcagatgttatcgaggtccgacnnnnnncttattaaacgcctacaacacccccgatcggatacgcatgaggct

SEQ ID NO: 832 - DNA, 146 bp, Artificial Sequence
  Bisulfite Padlock Probe
  misc_feature 95, 96, 97, 98, 99, 100: n = A,T,C or G
gactggaagagcactgttaaaataacgtacgacacaaaacctaacagttggaggctcatcgttcctattcaggcagatgttatcgaggtccgacnnnnnnactcatttaaaatcctcccacaaaaagatcggatacgcatgaggct

SEQ ID NO: 833 - DNA, 146 bp, Artificial Sequence
  Bisulfite Padlock Probe
  misc_feature 95, 96, 97, 98, 99, 100: n = A,T,C or G
gactggaagagcactgttaaaataacgtacgacgcaaaacctaacagttggaggctcatcgttcctattcaggcagatgttatcgaggtccgacnnnnnnactcgtttaaaatcctcccacaaaaagatcggatacgcatgaggct

SEQ ID NO: 834 - DNA, 146 bp, Artificial Sequence
  Bisulfite Padlock Probe
  misc_feature 94, 95, 96, 97, 98, 99: n = A,T,C or G
gactggaagagcactgttaaaataacgtttttctcctaaccttacgttggaggctcatcgttcctattcaggcagatgttatcgaggtccgacnnnnnnacaaaaaccgaaaatcccgccaatctcgatcggatacgcatgaggct

SEQ ID NO: 835 - DNA, 146 bp, Artificial Sequence
  Bisulfite Padlock Probe
  misc_feature 96, 97, 98, 99, 100, 101: n = A,T,C or G
gactggaagagcactgttaaaataactttaacaaactctacaaatatgttggaggctcatcgttcctattcaggcagatgttatcgaggtccgacnnnnnntactcgactaactaacaaaataaacgatcggatacgcatgaggct

SEQ ID NO: 836 - DNA, 146 bp, Artificial Sequence
  Bisulfite Padlock Probe
  misc_feature 96, 97, 98, 99, 100, 101: n = A,T,C or G
gactggaagagcactgttaaaataactttaacaaactctacgaatatgttggaggctcatcgttcctattcaggcagatgttatcgaggtccgacnnnnnntactcgactaactaacgaaataaacgatcggatacgcatgaggct

SEQ ID NO: 837 - DNA, 146 bp, Artificial Sequence
  Bisulfite Padlock Probe
  misc_feature 92, 93, 94, 95, 96, 97: n = A,T,C or G
gactggaagagcactgttaaaataataacctctcccaaaatatgttggaggctcatcgttcctattcaggcagatgttatcgaggtccgacnnnnnncccaaaaataaaacaaaaccttaactatcgatcggatacgcatgaggct

SEQ ID NO: 838 - DNA, 146 bp, Artificial Sequence
  Bisulfite Padlock Probe
  misc_feature 92, 93, 94, 95, 96, 97: n = A,T,C or G
gactggaagagcactgttaaaataataacctctcccgaaatatgttggaggctcatcgttcctattcaggcagatgttatcgaggtccgacnnnnnncccaaaaataaaacaaaaccttaactatcgatcggatacgcatgaggct

SEQ ID NO: 839 - DNA, 146 bp, Artificial Sequence
  Bisulfite Padlock Probe
  misc_feature 95, 96, 97, 98, 99, 100: n = A,T,C or G
gactggaagagcactgttaaaataattaatcatactccaccaaaaagttggaggctcatcgttcctattcaggcagatgttatcgaggtccgacnnnnnntaccccctaacaactacatcaacctcgatcggatacgcatgaggct

SEQ ID NO: 840 - DNA, 146 bp, Artificial Sequence
  Bisulfite Padlock Probe
  misc_feature 95, 96, 97, 98, 99, 100: n = A,T,C or G
gactggaagagcactgttaaaataattaatcatactccaccaaaaagttggaggctcatcgttcctattcaggcagatgttatcgaggtccgacnnnnnntaccccctaacaactacgtcaacctcgatcggatacgcatgaggct

SEQ ID NO: 841 - DNA, 146 bp, Artificial Sequence
  Bisulfite Padlock Probe
  misc_feature 95, 96, 97, 98, 99, 100: n = A,T,C or G
gactggaagagcactgttaaaatacacctaaaacaaaaactataacgttggaggctcatcgttcctattcaggcagatgttatcgaggtccgacnnnnnnaaaacgactcaaatcctcgccataccgatcggatacgcatgaggct

SEQ ID NO: 842 - DNA, 146 bp, Artificial Sequence
  Bisulfite Padlock Probe
  misc_feature 95, 96, 97, 98, 99, 100: n = A,T,C or G
gactggaagagcactgttaaaatacacctaaaacaaaaactataacgttggaggctcatcgttcctattcaggcagatgttatcgaggtccgacnnnnnnaaaacgactcaaatcctcgccgtaccgatcggatacgcatgaggct

SEQ ID NO: 843 - DNA, 146 bp, Artificial Sequence
  Bisulfite Padlock Probe
  misc_feature 96, 97, 98, 99, 100, 101: n = A,T,C or G
gactggaagagcactgttaaaataccacgccatatacccaacacaatgttggaggctcatcgttcctattcaggcagatgttatcgaggtccgacnnnnnnccaaaccaataacaaatttaccaacgatcggatacgcatgaggct

SEQ ID NO: 844 - DNA, 146 bp, Artificial Sequence
  Bisulfite Padlock Probe
  misc_feature 96, 97, 98, 99, 100, 101: n = A,T,C or G
gactggaagagcactgttaaaataccacgccgtatacccaacacaatgttggaggctcatcgttcctattcaggcagatgttatcgaggtccgacnnnnnnccaaaccaataacgaatttaccaacgatcggatacgcatgaggct

SEQ ID NO: 845 - DNA, 146 bp, Artificial Sequence
  Bisulfite Padlock Probe
  misc_feature 93, 94, 95, 96, 97, 98: n = A,T,C or G
gactggaagagcactgttaaaatacccctttcctaaacaataatgttggaggctcatcgttcctattcaggcagatgttatcgaggtccgacnnnnnnataacaaatcgctaaacgacactcaaacgatcggatacgcatgaggct

SEQ ID NO: 846 - DNA, 146 bp, Artificial Sequence
  Bisulfite Padlock Probe
  misc_feature 93, 94, 95, 96, 97, 98: n = A,T,C or G
gactggaagagcactgttaaaatacccctttcctaaacaataatgttggaggctcatcgttcctattcaggcagatgttatcgaggtccgacnnnnnnataacaaatcgctaaacgacgctcaaacgatcggatacgcatgaggct

SEQ ID NO: 847 - DNA, 146 bp, Artificial Sequence
  Bisulfite Padlock Probe
  misc_feature 92, 93, 94, 95, 96, 97: n = A,T,C or G
gactggaagagcactgttaaaataccgaactctacaaaacaacgttggaggctcatcgttcctattcaggcagatgttatcgaggtccgacnnnnnnataataacgaccaaaactaccaaaaactcgatcggatacgcatgaggct

SEQ ID NO: 848 - DNA, 146 bp, Artificial Sequence
  Bisulfite Padlock Probe
  misc_feature 92, 93, 94, 95, 96, 97: n = A,T,C or G
gactggaagagcactgttaaaataccgaactctacgaaacaacgttggaggctcatcgttcctattcaggcagatgttatcgaggtccgacnnnnnnataataacgaccgaaactaccaaaaactcgatcggatacgcatgaggct

SEQ ID NO: 849 - DNA, 146 bp, Artificial Sequence
  Bisulfite Padlock Probe
  misc_feature 92, 93, 94, 95, 96, 97: n = A,T,C or G
gactggaagagcactgttaaaatacgaacaaaaaccccttaaagttggaggctcatcgttcctattcaggcagatgttatcgaggtccgacnnnnnnacttcaaaatttctacaaacatcaaaatcgatcggatacgcatgaggct

SEQ ID NO: 850 - DNA, 146 bp, Artificial Sequence
  Bisulfite Padlock Probe
  misc_feature 92, 93, 94, 95, 96, 97: n = A,T,C or G
gactggaagagcactgttaaaatacgaacgaaaaccccttaaagttggaggctcatcgttcctattcaggcagatgttatcgaggtccgacnnnnnnacttcaaaatttctacaaacatcgaaatcgatcggatacgcatgaggct

SEQ ID NO: 851 - DNA, 146 bp, Artificial Sequence
  Bisulfite Padlock Probe
  misc_feature 92, 93, 94, 95, 96, 97: n = A,T,C or G
gactggaagagcactgttaaaatactctcccaaataaacttaagttggaggctcatcgttcctattcaggcagatgttatcgaggtccgacnnnnnnaaattcccgaaaatactaaaaccaaaaaagatcggatacgcatgaggct

SEQ ID NO: 852 - DNA, 146 bp, Artificial Sequence
  Bisulfite Padlock Probe
  misc_feature 92, 93, 94, 95, 96, 97: n = A,T,C or G
gactggaagagcactgttaaaatactctcccaaataaacttaagttggaggctcatcgttcctattcaggcagatgttatcgaggtccgacnnnnnnaaattcccgaaaatactaaaaccgaaaaagatcggatacgcatgaggct

SEQ ID NO: 853 - DNA, 146 bp, Artificial Sequence
  Bisulfite Padlock Probe
  misc_feature 92, 93, 94, 95, 96, 97: n = A,T,C or G
gactggaagagcactgttaaaatataccatctttatctttaacgttggaggctcatcgttcctattcaggcagatgttatcgaggtccgacnnnnnnctaactcttcaataaaataaacctaaaaagatcggatacgcatgaggct

SEQ ID NO: 854 - DNA, 146 bp, Artificial Sequence
  Bisulfite Padlock Probe
  misc_feature 92, 93, 94, 95, 96, 97: n = A,T,C or G
gactggaagagcactgttaaaatataccgtctttatctttaacgttggaggctcatcgttcctattcaggcagatgttatcgaggtccgacnnnnnnctaactcttcgataaaataaacctaaaaagatcggatacgcatgaggct

SEQ ID NO: 855 - DNA, 146 bp, Artificial Sequence
  Bisulfite Padlock Probe
  misc_feature 92, 93, 94, 95, 96, 97: n = A,T,C or G
gactggaagagcactgttaaaatatacttcgaaaatccgcaacgttggaggctcatcgttcctattcaggcagatgttatcgaggtccgacnnnnnntacaactccttccccaaaatcccatattcgatcggatacgcatgaggct

SEQ ID NO: 856 - DNA, 146 bp, Artificial Sequence
  Bisulfite Padlock Probe
  misc_feature 92, 93, 94, 95, 96, 97: n = A,T,C or G
gactggaagagcactgttaaaatatacttcgaaaatccgcgacgttggaggctcatcgttcctattcaggcagatgttatcgaggtccgacnnnnnntacaactccttccccaaaatcccatattcgatcggatacgcatgaggct

SEQ ID NO: 857 - DNA, 146 bp, Artificial Sequence
  Bisulfite Padlock Probe
  misc_feature 92, 93, 94, 95, 96, 97: n = A,T,C or G
gactggaagagcactgttaaaatatactttaaaaacaaatcaagttggaggctcatcgttcctattcaggcagatgttatcgaggtccgacnnnnnnttcccacaactcgctaatcacactaaaaagatcggatacgcatgaggct

SEQ ID NO: 858 - DNA, 146 bp, Artificial Sequence
  Bisulfite Padlock Probe
  misc_feature 92, 93, 94, 95, 96, 97: n = A,T,C or G
gactggaagagcactgttaaaatatactttaaaaacaaatcaagttggaggctcatcgttcctattcaggcagatgttatcgaggtccgacnnnnnnttcccacaactcgctaatcacgctaaaaagatcggatacgcatgaggct

SEQ ID NO: 859 - DNA, 146 bp, Artificial Sequence
  Bisulfite Padlock Probe
  misc_feature 93, 94, 95, 96, 97, 98: n = A,T,C or G
gactggaagagcactgttaaaatcaacgtctccatatcaaactcgttggaggctcatcgttcctattcaggcagatgttatcgaggtccgacnnnnnnctattaacctcgacgaactcacaaaactgatcggatacgcatgaggct

SEQ ID NO: 860 - DNA, 146 bp, Artificial Sequence
  Bisulfite Padlock Probe
  misc_feature 93, 94, 95, 96, 97, 98: n = A,T,C or G
gactggaagagcactgttaaaatcaacgtctccatatcgaactcgttggaggctcatcgttcctattcaggcagatgttatcgaggtccgacnnnnnnctattaacctcgacgaactcgcaaaactgatcggatacgcatgaggct

SEQ ID NO: 861 - DNA, 146 bp, Artificial Sequence
  Bisulfite Padlock Probe
  misc_feature 96, 97, 98, 99, 100, 101: n = A,T,C or G
gactggaagagcactgttaaaatccataataaaacaattacaacaaagttggaggctcatcgttcctattcaggcagatgttatcgaggtccgacnnnnnnaaaaatatacgcaaactccaactacgatcggatacgcatgaggct

SEQ ID NO: 862 - DNA, 146 bp, Artificial Sequence
  Bisulfite Padlock Probe
  misc_feature 96, 97, 98, 99, 100, 101: n = A,T,C or G
gactggaagagcactgttaaaatccataataaaacgattacaacaaagttggaggctcatcgttcctattcaggcagatgttatcgaggtccgacnnnnnnaaaaatatacgcgaactccaactacgatcggatacgcatgaggct

SEQ ID NO: 863 - DNA, 146 bp, Artificial Sequence
  Bisulfite Padlock Probe
  misc_feature 94, 95, 96, 97, 98, 99: n = A,T,C or G
gactggaagagcactgttaaaatccgaataaaaacgcgacgacacgttggaggctcatcgttcctattcaggcagatgttatcgaggtccgacnnnnnncaaaaatacgataaacaaacccgccacgatcggatacgcatgaggct

SEQ ID NO: 864 - DNA, 146 bp, Artificial Sequence
  Bisulfite Padlock Probe
  misc_feature 94, 95, 96, 97, 98, 99: n = A,T,C or G
gactggaagagcactgttaaaatccgaataaaaacgcgacgacgcgttggaggctcatcgttcctattcaggcagatgttatcgaggtccgacnnnnnncaaaaatacgataaacaaacccgccgcgatcggatacgcatgaggct

SEQ ID NO: 865 - DNA, 146 bp, Artificial Sequence
  Bisulfite Padlock Probe
  misc_feature 92, 93, 94, 95, 96, 97: n = A,T,C or G
gactggaagagcactgttaaaatcctactacccaataaaaatcgttggaggctcatcgttcctattcaggcagatgttatcgaggtccgacnnnnnncctacaaaacccttctaaatcctcaataagatcggatacgcatgaggct

SEQ ID NO: 866 - DNA, 146 bp, Artificial Sequence
  Bisulfite Padlock Probe
  misc_feature 92, 93, 94, 95, 96, 97: n = A,T,C or G
gactggaagagcactgttaaaatcctactacccaataaaaatcgttggaggctcatcgttcctattcaggcagatgttatcgaggtccgacnnnnnncctacaaaacccttctaaatcctcgataagatcggatacgcatgaggct

SEQ ID NO: 867 - DNA, 146 bp, Artificial Sequence
  Bisulfite Padlock Probe
  misc_feature 94, 95, 96, 97, 98, 99: n = A,T,C or G
gactggaagagcactgttaaaatcgaaacctcaaaccaaaactaagttggaggctcatcgttcctattcaggcagatgttatcgaggtccgacnnnnnnaaaaacctcaatatccacacataatctgatcggatacgcatgaggct

SEQ ID NO: 868 - DNA, 146 bp, Artificial Sequence
  Bisulfite Padlock Probe
  misc_feature 94, 95, 96, 97, 98, 99: n = A,T,C or G
gactggaagagcactgttaaaatcgaaacctcaaaccgaaactaagttggaggctcatcgttcctattcaggcagatgttatcgaggtccgacnnnnnnaaaaacctcaatatccacacgtaatctgatcggatacgcatgaggct

SEQ ID NO: 869 - DNA, 146 bp, Artificial Sequence
  Bisulfite Padlock Probe
  misc_feature 92, 93, 94, 95, 96, 97: n = A,T,C or G
gactggaagagcactgttaaaatctaacaaaaacaattaatcagttggaggctcatcgttcctattcaggcagatgttatcgaggtccgacnnnnnnaaatctataaaacgaaaaaccaaaatcccgatcggatacgcatgaggct

SEQ ID NO: 870 - DNA, 146 bp, Artificial Sequence
  Bisulfite Padlock Probe
  misc_feature 92, 93, 94, 95, 96, 97: n = A,T,C or G
gactggaagagcactgttaaaatctaacaaaaacgattaatcagttggaggctcatcgttcctattcaggcagatgttatcgaggtccgacnnnnnnaaatctataaaacgaaaaaccgaaatcccgatcggatacgcatgaggct

SEQ ID NO: 871 - DNA, 146 bp, Artificial Sequence
  Bisulfite Padlock Probe
  misc_feature 92, 93, 94, 95, 96, 97: n = A,T,C or G
gactggaagagcactgttaaaatcttcaaccaacctcccacaagttggaggctcatcgttcctattcaggcagatgttatcgaggtccgacnnnnnncttatttatttatttccaaaatatactccgatcggatacgcatgaggct

SEQ ID NO: 872 - DNA, 146 bp, Artificial Sequence
  Bisulfite Padlock Probe
  misc_feature 92, 93, 94, 95, 96, 97: n = A,T,C or G
gactggaagagcactgttaaaatcttcaaccaacctcccacaagttggaggctcatcgttcctattcaggcagatgttatcgaggtccgacnnnnnncttatttatttatttccgaaatatactccgatcggatacgcatgaggct

SEQ ID NO: 873 - DNA, 146 bp, Artificial Sequence
  Bisulfite Padlock Probe
  misc_feature 96, 97, 98, 99, 100, 101: n = A,T,C or G
gactggaagagcactgttaaaatctttttaaccaccataatcttaccgttggaggctcatcgttcctattcaggcagatgttatcgaggtccgacnnnnnnaaaaacaaccgctacaactaaaccagatcggatacgcatgaggct

SEQ ID NO: 874 - DNA, 146 bp, Artificial Sequence
  Bisulfite Padlock Probe
  misc_feature 96, 97, 98, 99, 100, 101: n = A,T,C or G
gactggaagagcactgttaaaatctttttaaccgccataatcttaccgttggaggctcatcgttcctattcaggcagatgttatcgaggtccgacnnnnnnaaaaacaaccgctacgactaaaccagatcggatacgcatgaggct

SEQ ID NO: 875 - DNA, 146 bp, Artificial Sequence
  Bisulfite Padlock Probe
  misc_feature 92, 93, 94, 95, 96, 97: n = A,T,C or G
gactggaagagcactgttaaaattaatcccacctccaaatctcgttggaggctcatcgttcctattcaggcagatgttatcgaggtccgacnnnnnnactacctaaataacaccctactacaaaccgatcggatacgcatgaggct

SEQ ID NO: 876 - DNA, 146 bp, Artificial Sequence
  Bisulfite Padlock Probe
  misc_feature 92, 93, 94, 95, 96, 97: n = A,T,C or G
gactggaagagcactgttaaaattaatcccacctccaaatctcgttggaggctcatcgttcctattcaggcagatgttatcgaggtccgacnnnnnnactacctaaataacgccctactacaaaccgatcggatacgcatgaggct

SEQ ID NO: 877 - DNA, 146 bp, Artificial Sequence
  Bisulfite Padlock Probe
  misc_feature 93, 94, 95, 96, 97, 98: n = A,T,C or G
gactggaagagcactgttaaaattaccccgaactccttaacaccgttggaggctcatcgttcctattcaggcagatgttatcgaggtccgacnnnnnnacccaaaacaatcacaaaaccaaacccagatcggatacgcatgaggct

SEQ ID NO: 878 - DNA, 146 bp, Artificial Sequence
  Bisulfite Padlock Probe
  misc_feature 93, 94, 95, 96, 97, 98: n = A,T,C or G
gactggaagagcactgttaaaattaccccgaactccttaacgccgttggaggctcatcgttcctattcaggcagatgttatcgaggtccgacnnnnnnacccgaaacaatcacaaaaccaaacccagatcggatacgcatgaggct

SEQ ID NO: 879 - DNA, 146 bp, Artificial Sequence
  Bisulfite Padlock Probe
  misc_feature 94, 95, 96, 97, 98, 99: n = A,T,C or G
gactggaagagcactgttaaaattacgacccgaacactccaaaacgttggaggctcatcgttcctattcaggcagatgttatcgaggtccgacnnnnnntatacgactcgacgcaaactcacaaaagatcggatacgcatgaggct

SEQ ID NO: 880 - DNA, 146 bp, Artificial Sequence
  Bisulfite Padlock Probe
  misc_feature 94, 95, 96, 97, 98, 99: n = A,T,C or G
gactggaagagcactgttaaaattacgacccgaacgctccaaaacgttggaggctcatcgttcctattcaggcagatgttatcgaggtccgacnnnnnntatacgactcgacgcgaactcacaaaagatcggatacgcatgaggct

SEQ ID NO: 881 - DNA, 146 bp, Artificial Sequence
  Bisulfite Padlock Probe
  misc_feature 96, 97, 98, 99, 100, 101: n = A,T,C or G
gactggaagagcactgttaaaattataaaactacaaatttcatataagttggaggctcatcgttcctattcaggcagatgttatcgaggtccgacnnnnnnaactaaaatcgaaatactcaaccaagatcggatacgcatgaggct

SEQ ID NO: 882 - DNA, 146 bp, Artificial Sequence
  Bisulfite Padlock Probe
  misc_feature 96, 97, 98, 99, 100, 101: n = A,T,C or G
gactggaagagcactgttaaaattataaaactacaaatttcatataagttggaggctcatcgttcctattcaggcagatgttatcgaggtccgacnnnnnnaactaaaatcgaaatactcgaccaagatcggatacgcatgaggct

SEQ ID NO: 883 - DNA, 146 bp, Artificial Sequence
  Bisulfite Padlock Probe
  misc_feature 96, 97, 98, 99, 100, 101: n = A,T,C or G
gactggaagagcactgttaaaattcacaccaaaaacactcccaaaaagttggaggctcatcgttcctattcaggcagatgttatcgaggtccgacnnnnnnaaacgaaacgaaactacacaaaaccgatcggatacgcatgaggct

SEQ ID NO: 884 - DNA, 146 bp, Artificial Sequence
  Bisulfite Padlock Probe
  misc_feature 92, 93, 94, 95, 96, 97: n = A,T,C or G
gactggaagagcactgttaaaattcaccgatccttccaccaccgttggaggctcatcgttcctattcaggcagatgttatcgaggtccgacnnnnnncctccccctctcaaaactatctccaacctgatcggatacgcatgaggct

SEQ ID NO: 885 - DNA, 146 bp, Artificial Sequence
  Bisulfite Padlock Probe
  misc_feature 92, 93, 94, 95, 96, 97: n = A,T,C or G
gactggaagagcactgttaaaattcaccgatccttccgccaccgttggaggctcatcgttcctattcaggcagatgttatcgaggtccgacnnnnnncctccccctctcaaaactatctccaacctgatcggatacgcatgaggct

SEQ ID NO: 886 - DNA, 146 bp, Artificial Sequence
  Bisulfite Padlock Probe
  misc_feature 96, 97, 98, 99, 100, 101: n = A,T,C or G
gactggaagagcactgttaaaattcacgccaaaaacactcccaaaaagttggaggctcatcgttcctattcaggcagatgttatcgaggtccgacnnnnnnaaacgaaacgaaactacacgaaaccgatcggatacgcatgaggct

SEQ ID NO: 887 - DNA, 146 bp, Artificial Sequence
  Bisulfite Padlock Probe
  misc_feature 92, 93, 94, 95, 96, 97: n = A,T,C or G
gactggaagagcactgttaaaattcccgaacgcaacgaaacacgttggaggctcatcgttcctattcaggcagatgttatcgaggtccgacnnnnnnaaaaatacgaaaatacaatcacgcaaaaagatcggatacgcatgaggct

SEQ ID NO: 888 - DNA, 146 bp, Artificial Sequence
  Bisulfite Padlock Probe
  misc_feature 92, 93, 94, 95, 96, 97: n = A,T,C or G
gactggaagagcactgttaaaattcccgaacgcaacgaaacgcgttggaggctcatcgttcctattcaggcagatgttatcgaggtccgacnnnnnnaaaaatacgaaaatacaatcacgcgaaaagatcggatacgcatgaggct

SEQ ID NO: 889 - DNA, 146 bp, Artificial Sequence
  Bisulfite Padlock Probe
  misc_feature 94, 95, 96, 97, 98, 99: n = A,T,C or G
gactggaagagcactgttaaaattcttataacaacatccataaacgttggaggctcatcgttcctattcaggcagatgttatcgaggtccgacnnnnnnttaattcttaataaatttctaaaacccgatcggatacgcatgaggct

SEQ ID NO: 890 - DNA, 146 bp, Artificial Sequence
  Bisulfite Padlock Probe
  misc_feature 94, 95, 96, 97, 98, 99: n = A,T,C or G
gactggaagagcactgttaaaatttattaacaaacaaaataaaaagttggaggctcatcgttcctattcaggcagatgttatcgaggtccgacnnnnnnaacacacctaaataataaacacctcccgatcggatacgcatgaggct

SEQ ID NO: 891 - DNA, 146 bp, Artificial Sequence
  Bisulfite Padlock Probe
  misc_feature 94, 95, 96, 97, 98, 99: n = A,T,C or G
gactggaagagcactgttaaaatttattaacaaacaaaataaaaagttggaggctcatcgttcctattcaggcagatgttatcgaggtccgacnnnnnnaacgcacctaaataataaacacctcccgatcggatacgcatgaggct

SEQ ID NO: 892 - DNA, 146 bp, Artificial Sequence
  Bisulfite Padlock Probe
  misc_feature 95, 96, 97, 98, 99, 100: n = A,T,C or G
gactggaagagcactgttaaacaaaaacataaaccaaaaccaaaccgttggaggctcatcgttcctattcaggcagatgttatcgaggtccgacnnnnnnactactactcgaccaaacaataactagatcggatacgcatgaggct

SEQ ID NO: 893 - DNA, 146 bp, Artificial Sequence
  Bisulfite Padlock Probe
  misc_feature 95, 96, 97, 98, 99, 100: n = A,T,C or G
gactggaagagcactgttaaacaaaaacataaaccaaaaccaaaccgttggaggctcatcgttcctattcaggcagatgttatcgaggtccgacnnnnnnactactactcgaccaaacgataactagatcggatacgcatgaggct

SEQ ID NO: 894 - DNA, 146 bp, Artificial Sequence
  Bisulfite Padlock Probe
  misc_feature 95, 96, 97, 98, 99, 100: n = A,T,C or G
gactggaagagcactgttaaacaaaaacttactctaacttatttcagttggaggctcatcgttcctattcaggcagatgttatcgaggtccgacnnnnnnacaaacaatacattataaacaaaaccgatcggatacgcatgaggct

SEQ ID NO: 895 - DNA, 146 bp, Artificial Sequence
  Bisulfite Padlock Probe
  misc_feature 95, 96, 97, 98, 99, 100: n = A,T,C or G
gactggaagagcactgttaaacaaaaacttactctaacttatttcagttggaggctcatcgttcctattcaggcagatgttatcgaggtccgacnnnnnnacgaacaatacattataaacaaaaccgatcggatacgcatgaggct

SEQ ID NO: 896 - DNA, 146 bp, Artificial Sequence
  Bisulfite Padlock Probe
  misc_feature 92, 93, 94, 95, 96, 97: n = A,T,C or G
gactggaagagcactgttaaacaaaaatatccacatcaacacagttggaggctcatcgttcctattcaggcagatgttatcgaggtccgacnnnnnnaaaactatcatatactttacaaataaacagatcggatacgcatgaggct

SEQ ID NO: 897 - DNA, 146 bp, Artificial Sequence
  Bisulfite Padlock Probe
  misc_feature 92, 93, 94, 95, 96, 97: n = A,T,C or G
gactggaagagcactgttaaacaaaaatatccacgtcaacacagttggaggctcatcgttcctattcaggcagatgttatcgaggtccgacnnnnnnaaaactatcgtatactttacaaataaacagatcggatacgcatgaggct

SEQ ID NO: 898 - DNA, 146 bp, Artificial Sequence
  Bisulfite Padlock Probe
  misc_feature 92, 93, 94, 95, 96, 97: n = A,T,C or G
gactggaagagcactgttaaacaaaaatccgcaaacacaaaacgttggaggctcatcgttcctattcaggcagatgttatcgaggtccgacnnnnnnctcgacaaaccgcataaaacacaacaactgatcggatacgcatgaggct

SEQ ID NO: 899 - DNA, 146 bp, Artificial Sequence
  Bisulfite Padlock Probe
  misc_feature 92, 93, 94, 95, 96, 97: n = A,T,C or G
gactggaagagcactgttaaacaaaaatccgcgaacacaaaacgttggaggctcatcgttcctattcaggcagatgttatcgaggtccgacnnnnnnctcgacaaaccgcataaaacgcaacaactgatcggatacgcatgaggct

SEQ ID NO: 900 - DNA, 146 bp, Artificial Sequence
  Bisulfite Padlock Probe
  misc_feature 94, 95, 96, 97, 98, 99: n = A,T,C or G
gactggaagagcactgttaaacaaaaatctctactcaactccttcgttggaggctcatcgttcctattcaggcagatgttatcgaggtccgacnnnnnnccatctctcaacaaccacatctaaaccgatcggatacgcatgaggct

SEQ ID NO: 901 - DNA, 146 bp, Artificial Sequence
  Bisulfite Padlock Probe
  misc_feature 94, 95, 96, 97, 98, 99: n = A,T,C or G
gactggaagagcactgttaaacaaaaatctctactcgactccttcgttggaggctcatcgttcctattcaggcagatgttatcgaggtccgacnnnnnnccatctctcaacaaccgcatctaaaccgatcggatacgcatgaggct

SEQ ID NO: 902 - DNA, 146 bp, Artificial Sequence
  Bisulfite Padlock Probe
  misc_feature 95, 96, 97, 98, 99, 100: n = A,T,C or G
gactggaagagcactgttaaacaaaacgcacaaaatcaaaataaaagttggaggctcatcgttcctattcaggcagatgttatcgaggtccgacnnnnnnttcctatcctcaaaaatacctaccacgatcggatacgcatgaggct

SEQ ID NO: 903 - DNA, 146 bp, Artificial Sequence
  Bisulfite Padlock Probe
  misc_feature 95, 96, 97, 98, 99, 100: n = A,T,C or G
gactggaagagcactgttaaacaaaacgcacaaaatcgaaataaaagttggaggctcatcgttcctattcaggcagatgttatcgaggtccgacnnnnnnttcctatcctcaaaaatacctaccgcgatcggatacgcatgaggct

SEQ ID NO: 904 - DNA, 146 bp, Artificial Sequence
  Bisulfite Padlock Probe
  misc_feature 94, 95, 96, 97, 98, 99: n = A,T,C or G
gactggaagagcactgttaaacaaaataaaaataaaactcaataagttggaggctcatcgttcctattcaggcagatgttatcgaggtccgacnnnnnnccgttcgaaaaccccgaacaacaaaaagatcggatacgcatgaggct

SEQ ID NO: 905 - DNA, 146 bp, Artificial Sequence
  Bisulfite Padlock Probe
  misc_feature 94, 95, 96, 97, 98, 99: n = A,T,C or G
gactggaagagcactgttaaacaaaataaaaataaaactcgataagttggaggctcatcgttcctattcaggcagatgttatcgaggtccgacnnnnnnccgttcgaaaaccccgaacaacgaaaagatcggatacgcatgaggct

SEQ ID NO: 906 - DNA, 146 bp, Artificial Sequence
  Bisulfite Padlock Probe
  misc_feature 92, 93, 94, 95, 96, 97: n = A,T,C or G
gactggaagagcactgttaaacaaaatatcctaatacctcactgttggaggctcatcgttcctattcaggcagatgttatcgaggtccgacnnnnnnaaaaacccaactaaccacaaacctataccgatcggatacgcatgaggct

SEQ ID NO: 907 - DNA, 146 bp, Artificial Sequence
  Bisulfite Padlock Probe
  misc_feature 92, 93, 94, 95, 96, 97: n = A,T,C or G
gactggaagagcactgttaaacaaaatatcctaatacctcactgttggaggctcatcgttcctattcaggcagatgttatcgaggtccgacnnnnnnaaaaacccaactaaccgcaaacctataccgatcggatacgcatgaggct

SEQ ID NO: 908 - DNA, 146 bp, Artificial Sequence
  Bisulfite Padlock Probe
  misc_feature 94, 95, 96, 97, 98, 99: n = A,T,C or G
gactggaagagcactgttaaacaaaatctaaataaaatacttcacgttggaggctcatcgttcctattcaggcagatgttatcgaggtccgacnnnnnnccccaaataactcctaaatctaaacccgatcggatacgcatgaggct

SEQ ID NO: 909 - DNA, 146 bp, Artificial Sequence
  Bisulfite Padlock Probe
  misc_feature 94, 95, 96, 97, 98, 99: n = A,T,C or G
gactggaagagcactgttaaacaaaatctaaataaaatacttcgcgttggaggctcatcgttcctattcaggcagatgttatcgaggtccgacnnnnnnccccaaataactcctaaatctaaacccgatcggatacgcatgaggct

SEQ ID NO: 910 - DNA, 146 bp, Artificial Sequence
  Bisulfite Padlock Probe
  misc_feature 93, 94, 95, 96, 97, 98: n = A,T,C or G
gactggaagagcactgttaaacaaacaaattcctcctcactaaagttggaggctcatcgttcctattcaggcagatgttatcgaggtccgacnnnnnncgctaacgccacctaaataacaccaatagatcggatacgcatgaggct

SEQ ID NO: 911 - DNA, 146 bp, Artificial Sequence
  Bisulfite Padlock Probe
  misc_feature 92, 93, 94, 95, 96, 97: n = A,T,C or G
gactggaagagcactgttaaacaaacataaactcactaaatccgttggaggctcatcgttcctattcaggcagatgttatcgaggtccgacnnnnnnaattccttaaaaacaaaatcacatctaacgatcggatacgcatgaggct

SEQ ID NO: 912 - DNA, 146 bp, Artificial Sequence
  Bisulfite Padlock Probe
  misc_feature 92, 93, 94, 95, 96, 97: n = A,T,C or G
gactggaagagcactgttaaacaaaccgaaacccaaaaaccccgttggaggctcatcgttcctattcaggcagatgttatcgaggtccgacnnnnnnaaaaatactaaactaaactacacctccccgatcggatacgcatgaggct

SEQ ID NO: 913 - DNA, 146 bp, Artificial Sequence
  Bisulfite Padlock Probe
  misc_feature 92, 93, 94, 95, 96, 97: n = A,T,C or G
gactggaagagcactgttaaacaaaccgaaacccgaaaaccccgttggaggctcatcgttcctattcaggcagatgttatcgaggtccgacnnnnnnaaaaatactaaactaaactacgcctccccgatcggatacgcatgaggct

SEQ ID NO: 914 - DNA, 146 bp, Artificial Sequence
  Bisulfite Padlock Probe
  misc_feature 93, 94, 95, 96, 97, 98: n = A,T,C or G
gactggaagagcactgttaaacaaacgaattcctcctcactaaagttggaggctcatcgttcctattcaggcagatgttatcgaggtccgacnnnnnncgctaacgccgcctaaataacaccaatagatcggatacgcatgaggct

SEQ ID NO: 915 - DNA, 146 bp, Artificial Sequence
  Bisulfite Padlock Probe
  misc_feature 94, 95, 96, 97, 98, 99: n = A,T,C or G
gactggaagagcactgttaaacaaatatttctaaacaatcaaaaagttggaggctcatcgttcctattcaggcagatgttatcgaggtccgacnnnnnncaaaaaccctaatcacccccaaaaatagatcggatacgcatgaggct

SEQ ID NO: 916 - DNA, 146 bp, Artificial Sequence
  Bisulfite Padlock Probe
  misc_feature 94, 95, 96, 97, 98, 99: n = A,T,C or G
gactggaagagcactgttaaacaaatatttctaaacaatcaaaaagttggaggctcatcgttcctattcaggcagatgttatcgaggtccgacnnnnnncaaaaaccctaatcgcccccaaaaatagatcggatacgcatgaggct

SEQ ID NO: 917 - DNA, 146 bp, Artificial Sequence
  Bisulfite Padlock Probe
  misc_feature 93, 94, 95, 96, 97, 98: n = A,T,C or G
gactggaagagcactgttaaacaacaacccaaacaaaaacacccgttggaggctcatcgttcctattcaggcagatgttatcgaggtccgacnnnnnnctaaacattctcaaattctcaaatttttgatcggatacgcatgaggct

SEQ ID NO: 918 - DNA, 146 bp, Artificial Sequence
  Bisulfite Padlock Probe
  misc_feature 96, 97, 98, 99, 100, 101: n = A,T,C or G
gactggaagagcactgttaaacaacccaaaataaaaacaaaaaccccgttggaggctcatcgttcctattcaggcagatgttatcgaggtccgacnnnnnnaaaaatcactaaaactacccaaaaagatcggatacgcatgaggct

SEQ ID NO: 919 - DNA, 146 bp, Artificial Sequence
  Bisulfite Padlock Probe
  misc_feature 93, 94, 95, 96, 97, 98: n = A,T,C or G
gactggaagagcactgttaaacaacccccacaaataataaccaagttggaggctcatcgttcctattcaggcagatgttatcgaggtccgacnnnnnntctatccacccttctacatattctaaccgatcggatacgcatgaggct

SEQ ID NO: 920 - DNA, 146 bp, Artificial Sequence
  Bisulfite Padlock Probe
  misc_feature 93, 94, 95, 96, 97, 98: n = A,T,C or G
gactggaagagcactgttaaacaacccccgcaaataataaccaagttggaggctcatcgttcctattcaggcagatgttatcgaggtccgacnnnnnntctatccgcccttctacatattctaaccgatcggatacgcatgaggct

SEQ ID NO: 921 - DNA, 146 bp, Artificial Sequence
  Bisulfite Padlock Probe
  misc_feature 96, 97, 98, 99, 100, 101: n = A,T,C or G
gactggaagagcactgttaaacaacccgaaataaaaacaaaaaccccgttggaggctcatcgttcctattcaggcagatgttatcgaggtccgacnnnnnnaaaaatcactaaaactacccaaaaagatcggatacgcatgaggct

SEQ ID NO: 922 - DNA, 146 bp, Artificial Sequence
  Bisulfite Padlock Probe
  misc_feature 92, 93, 94, 95, 96, 97: n = A,T,C or G
gactggaagagcactgttaaacaacgactaccgaccaaccctagttggaggctcatcgttcctattcaggcagatgttatcgaggtccgacnnnnnnaaaacgaaaaatcacaaacaccccaaaaagatcggatacgcatgaggct

SEQ ID NO: 923 - DNA, 146 bp, Artificial Sequence
  Bisulfite Padlock Probe
  misc_feature 92, 93, 94, 95, 96, 97: n = A,T,C or G
gactggaagagcactgttaaacaacgactaccgaccgaccctagttggaggctcatcgttcctattcaggcagatgttatcgaggtccgacnnnnnnaaaacgaaaaatcacaaacgccccaaaaagatcggatacgcatgaggct

SEQ ID NO: 924 - DNA, 146 bp, Artificial Sequence
  Bisulfite Padlock Probe
  misc_feature 94, 95, 96, 97, 98, 99: n = A,T,C or G
gactggaagagcactgttaaacaactaatcacaaaacaataaaaagttggaggctcatcgttcctattcaggcagatgttatcgaggtccgacnnnnnnaaaaacccacacctacacaccaaaaacgatcggatacgcatgaggct

SEQ ID NO: 925 - DNA, 146 bp, Artificial Sequence
  Bisulfite Padlock Probe
  misc_feature 94, 95, 96, 97, 98, 99: n = A,T,C or G
gactggaagagcactgttaaacaactaatcacgaaacaataaaaagttggaggctcatcgttcctattcaggcagatgttatcgaggtccgacnnnnnnaaaaacccacacctacacgccaaaaacgatcggatacgcatgaggct

SEQ ID NO: 926 - DNA, 146 bp, Artificial Sequence
  Bisulfite Padlock Probe
  misc_feature 92, 93, 94, 95, 96, 97: n = A,T,C or G
gactggaagagcactgttaaacaactcccccactactaaatacgttggaggctcatcgttcctattcaggcagatgttatcgaggtccgacnnnnnnaacttaacataaaaacaaacaaacaactagatcggatacgcatgaggct

SEQ ID NO: 927 - DNA, 146 bp, Artificial Sequence
  Bisulfite Padlock Probe
  misc_feature 95, 96, 97, 98, 99, 100: n = A,T,C or G
gactggaagagcactgttaaacaatccaaaaacactaaaccaaaaagttggaggctcatcgttcctattcaggcagatgttatcgaggtccgacnnnnnnttccacttcccaaccacctacaaaccgatcggatacgcatgaggct

SEQ ID NO: 928 - DNA, 146 bp, Artificial Sequence
  Bisulfite Padlock Probe
  misc_feature 94, 95, 96, 97, 98, 99: n = A,T,C or G
gactggaagagcactgttaaacaatccctacaccaaaacaaccccgttggaggctcatcgttcctattcaggcagatgttatcgaggtccgacnnnnnncctccaacttctacaacgcaataaaccgatcggatacgcatgaggct

SEQ ID NO: 929 - DNA, 146 bp, Artificial Sequence
  Bisulfite Padlock Probe
  misc_feature 94, 95, 96, 97, 98, 99: n = A,T,C or G
gactggaagagcactgttaaacaatccctacaccaaaacgaccccgttggaggctcatcgttcctattcaggcagatgttatcgaggtccgacnnnnnncctccaacttctacaacgcgataaaccgatcggatacgcatgaggct

SEQ ID NO: 930 - DNA, 146 bp, Artificial Sequence
  Bisulfite Padlock Probe
  misc_feature 92, 93, 94, 95, 96, 97: n = A,T,C or G
gactggaagagcactgttaaacaatcttctccgcatccccctcgttggaggctcatcgttcctattcaggcagatgttatcgaggtccgacnnnnnnaaaattaccccctatacaaataacaactagatcggatacgcatgaggct

SEQ ID NO: 931 - DNA, 146 bp, Artificial Sequence
  Bisulfite Padlock Probe
  misc_feature 92, 93, 94, 95, 96, 97: n = A,T,C or G
gactggaagagcactgttaaacaatcttctccgcgtccccctcgttggaggctcatcgttcctattcaggcagatgttatcgaggtccgacnnnnnnaaaattaccccctatacaaataacaactagatcggatacgcatgaggct

SEQ ID NO: 932 - DNA, 146 bp, Artificial Sequence
  Bisulfite Padlock Probe
  misc_feature 95, 96, 97, 98, 99, 100: n = A,T,C or G
gactggaagagcactgttaaacacaaacaacatcaactccaacatcgttggaggctcatcgttcctattcaggcagatgttatcgaggtccgacnnnnnncctacctaaaacctactacctataccgatcggatacgcatgaggct

SEQ ID NO: 933 - DNA, 146 bp, Artificial Sequence
  Bisulfite Padlock Probe
  misc_feature 94, 95, 96, 97, 98, 99: n = A,T,C or G
gactggaagagcactgttaaacacaacctaaaaataaaataaaccgttggaggctcatcgttcctattcaggcagatgttatcgaggtccgacnnnnnnccctaaaactcgacaacctaaaacaaagatcggatacgcatgaggct

SEQ ID NO: 934 - DNA, 146 bp, Artificial Sequence
  Bisulfite Padlock Probe
  misc_feature 94, 95, 96, 97, 98, 99: n = A,T,C or G
gactggaagagcactgttaaacacaacctaaaaataaaataaaccgttggaggctcatcgttcctattcaggcagatgttatcgaggtccgacnnnnnnccctaaaactcgacgacctaaaacaaagatcggatacgcatgaggct

SEQ ID NO: 935 - DNA, 146 bp, Artificial Sequence
  Bisulfite Padlock Probe
  misc_feature 93, 94, 95, 96, 97, 98: n = A,T,C or G
gactggaagagcactgttaaacacaacgactaaaacgccccatcgttggaggctcatcgttcctattcaggcagatgttatcgaggtccgacnnnnnnaaccttaaacaaaacaaaaacctccttcgatcggatacgcatgaggct

SEQ ID NO: 936 - DNA, 146 bp, Artificial Sequence
  Bisulfite Padlock Probe
  misc_feature 93, 94, 95, 96, 97, 98: n = A,T,C or G
gactggaagagcactgttaaacacaacgactaaaacgccccgtcgttggaggctcatcgttcctattcaggcagatgttatcgaggtccgacnnnnnnaaccttaaacgaaacaaaaacctccttcgatcggatacgcatgaggct

SEQ ID NO: 937 - DNA, 146 bp, Artificial Sequence
  Bisulfite Padlock Probe
  misc_feature 93, 94, 95, 96, 97, 98: n = A,T,C or G
gactggaagagcactgttaaacacacccctaatttataaacaacgttggaggctcatcgttcctattcaggcagatgttatcgaggtccgacnnnnnnaaataaaaatacgccccacaacctcctagatcggatacgcatgaggct

SEQ ID NO: 938 - DNA, 146 bp, Artificial Sequence
  Bisulfite Padlock Probe
  misc_feature 93, 94, 95, 96, 97, 98: n = A,T,C or G
gactggaagagcactgttaaacacatatatacaaccaaatcaccgttggaggctcatcgttcctattcaggcagatgttatcgaggtccgacnnnnnntaacataattatccaaactaaaacatccgatcggatacgcatgaggct

SEQ ID NO: 939 - DNA, 146 bp, Artificial Sequence
  Bisulfite Padlock Probe
  misc_feature 92, 93, 94, 95, 96, 97: n = A,T,C or G
gactggaagagcactgttaaacacattcactccccctaaccccgttggaggctcatcgttcctattcaggcagatgttatcgaggtccgacnnnnnnccccattcaaacaaacctacatacaaaaagatcggatacgcatgaggct

SEQ ID NO: 940 - DNA, 146 bp, Artificial Sequence
  Bisulfite Padlock Probe
  misc_feature 93, 94, 95, 96, 97, 98: n = A,T,C or G
gactggaagagcactgttaaacacatttttcaacatataataaagttggaggctcatcgttcctattcaggcagatgttatcgaggtccgacnnnnnnacaccgaaacaacccacgaaactcaaaagatcggatacgcatgaggct

SEQ ID NO: 941 - DNA, 146 bp, Artificial Sequence
  Bisulfite Padlock Probe
  misc_feature 93, 94, 95, 96, 97, 98: n = A,T,C or G
gactggaagagcactgttaaacacatttttcaacatataataaagttggaggctcatcgttcctattcaggcagatgttatcgaggtccgacnnnnnnacaccgaaacaacccacgaaactcgaaagatcggatacgcatgaggct

SEQ ID NO: 942 - DNA, 146 bp, Artificial Sequence
  Bisulfite Padlock Probe
  misc_feature 94, 95, 96, 97, 98, 99: n = A,T,C or G
gactggaagagcactgttaaacaccaaaccaaaaattcctaaaaagttggaggctcatcgttcctattcaggcagatgttatcgaggtccgacnnnnnnacctccaaacactatataaacaaacccgatcggatacgcatgaggct

SEQ ID NO: 943 - DNA, 146 bp, Artificial Sequence
  Bisulfite Padlock Probe
  misc_feature 95, 96, 97, 98, 99, 100: n = A,T,C or G
gactggaagagcactgttaaacaccaccaacaccaacaacatcaccgttggaggctcatcgttcctattcaggcagatgttatcgaggtccgacnnnnnnacttcccctaaaaaccctacaccaacgatcggatacgcatgaggct

SEQ ID NO: 944 - DNA, 146 bp, Artificial Sequence
  Bisulfite Padlock Probe
  misc_feature 92, 93, 94, 95, 96, 97: n = A,T,C or G
gactggaagagcactgttaaacacccaaaataaaacaactaaagttggaggctcatcgttcctattcaggcagatgttatcgaggtccgacnnnnnnaaacataatcccaacctcccaaacatatcgatcggatacgcatgaggct

SEQ ID NO: 945 - DNA, 146 bp, Artificial Sequence
  Bisulfite Padlock Probe
  misc_feature 92, 93, 94, 95, 96, 97: n = A,T,C or G
gactggaagagcactgttaaacacccccaaaactaaacccaccgttggaggctcatcgttcctattcaggcagatgttatcgaggtccgacnnnnnnaccccaacccaacttccacataatcaaacgatcggatacgcatgaggct

SEQ ID NO: 946 - DNA, 146 bp, Artificial Sequence
  Bisulfite Padlock Probe
  misc_feature 92, 93, 94, 95, 96, 97: n = A,T,C or G
gactggaagagcactgttaaacacccccaaaactaaacccgccgttggaggctcatcgttcctattcaggcagatgttatcgaggtccgacnnnnnnaccccgacccaacttccacataatcaaacgatcggatacgcatgaggct

SEQ ID NO: 947 - DNA, 146 bp, Artificial Sequence
  Bisulfite Padlock Probe
  misc_feature 94, 95, 96, 97, 98, 99: n = A,T,C or G
gactggaagagcactgttaaacacccctaaataacctaaaacaccgttggaggctcatcgttcctattcaggcagatgttatcgaggtccgacnnnnnnaaatcgcgtcttccctccctttcaatcgatcggatacgcatgaggct

SEQ ID NO: 948 - DNA, 146 bp, Artificial Sequence
  Bisulfite Padlock Probe
  misc_feature 93, 94, 95, 96, 97, 98: n = A,T,C or G
gactggaagagcactgttaaacaccttctttaattaactctaccgttggaggctcatcgttcctattcaggcagatgttatcgaggtccgacnnnnnnaactttattacatttatctaaataccccgatcggatacgcatgaggct

SEQ ID NO: 949 - DNA, 146 bp, Artificial Sequence
  Bisulfite Padlock Probe
  misc_feature 93, 94, 95, 96, 97, 98: n = A,T,C or G
gactggaagagcactgttaaacacgtatatacaaccaaatcaccgttggaggctcatcgttcctattcaggcagatgttatcgaggtccgacnnnnnntaacataattatccgaactaaaacatccgatcggatacgcatgaggct

SEQ ID NO: 950 - DNA, 146 bp, Artificial Sequence
  Bisulfite Padlock Probe
  misc_feature 93, 94, 95, 96, 97, 98: n = A,T,C or G
gactggaagagcactgttaaacatactcgtaaacctccaatatagttggaggctcatcgttcctattcaggcagatgttatcgaggtccgacnnnnnntaatactacaaaccccaaccatacaaccgatcggatacgcatgaggct

SEQ ID NO: 951 - DNA, 146 bp, Artificial Sequence
  Bisulfite Padlock Probe
  misc_feature 93, 94, 95, 96, 97, 98: n = A,T,C or G
gactggaagagcactgttaaacatactcgtaaacctccgatatagttggaggctcatcgttcctattcaggcagatgttatcgaggtccgacnnnnnntaatactacaaaccccgaccatacaaccgatcggatacgcatgaggct

SEQ ID NO: 952 - DNA, 146 bp, Artificial Sequence
  Bisulfite Padlock Probe
  misc_feature 92, 93, 94, 95, 96, 97: n = A,T,C or G
gactggaagagcactgttaaacatccacccaaaaacctctatcgttggaggctcatcgttcctattcaggcagatgttatcgaggtccgacnnnnnntacaatctttactctacgaaccaaaaacagatcggatacgcatgaggct

SEQ ID NO: 953 - DNA, 146 bp, Artificial Sequence
  Bisulfite Padlock Probe
  misc_feature 92, 93, 94, 95, 96, 97: n = A,T,C or G
gactggaagagcactgttaaacatccacccgaaaacctctatcgttggaggctcatcgttcctattcaggcagatgttatcgaggtccgacnnnnnntacaatctttactctacgaaccaaaaacggatcggatacgcatgaggct

SEQ ID NO: 954 - DNA, 146 bp, Artificial Sequence
  Bisulfite Padlock Probe
  misc_feature 92, 93, 94, 95, 96, 97: n = A,T,C or G
gactggaagagcactgttaaacattctctccttacccttccaagttggaggctcatcgttcctattcaggcagatgttatcgaggtccgacnnnnnnctttcaaacctctcaacctcccaacctccgatcggatacgcatgaggct

SEQ ID NO: 955 - DNA, 146 bp, Artificial Sequence
  Bisulfite Padlock Probe
  misc_feature 92, 93, 94, 95, 96, 97: n = A,T,C or G
gactggaagagcactgttaaaccaaaaaatctaaactataaccgttggaggctcatcgttcctattcaggcagatgttatcgaggtccgacnnnnnnacaaaacaacctcgcaaaactaaaaataagatcggatacgcatgaggct

SEQ ID NO: 956 - DNA, 146 bp, Artificial Sequence
  Bisulfite Padlock Probe
  misc_feature 94, 95, 96, 97, 98, 99: n = A,T,C or G
gactggaagagcactgttaaaccaaaaactaaccccaaataacccgttggaggctcatcgttcctattcaggcagatgttatcgaggtccgacnnnnnncccctataaacgaaacgaaacaacatcgatcggatacgcatgaggct

SEQ ID NO: 957 - DNA, 146 bp, Artificial Sequence
  Bisulfite Padlock Probe
  misc_feature 92, 93, 94, 95, 96, 97: n = A,T,C or G
gactggaagagcactgttaaaccaaaaccctaaacccaaaaccgttggaggctcatcgttcctattcaggcagatgttatcgaggtccgacnnnnnnatccgacaaaccgaccaaaaattattatcgatcggatacgcatgaggct

SEQ ID NO: 958 - DNA, 146 bp, Artificial Sequence
  Bisulfite Padlock Probe
  misc_feature 92, 93, 94, 95, 96, 97: n = A,T,C or G
gactggaagagcactgttaaaccaaaacgacaacccccaaaaagttggaggctcatcgttcctattcaggcagatgttatcgaggtccgacnnnnnngaaccaacctactccaactaacaataatagatcggatacgcatgaggct

SEQ ID NO: 959 - DNA, 146 bp, Artificial Sequence
  Bisulfite Padlock Probe
  misc_feature 92, 93, 94, 95, 96, 97: n = A,T,C or G
gactggaagagcactgttaaaccaaaacgacgacccccaaaaagttggaggctcatcgttcctattcaggcagatgttatcgaggtccgacnnnnnngaaccgacctactccaactaacaataatagatcggatacgcatgaggct

SEQ ID NO: 960 - DNA, 146 bp, Artificial Sequence
  Bisulfite Padlock Probe
  misc_feature 94, 95, 96, 97, 98, 99: n = A,T,C or G
gactggaagagcactgttaaaccaaaactacacttcctactcaacgttggaggctcatcgttcctattcaggcagatgttatcgaggtccgacnnnnnnctaaatctacccacaacccccacactcgatcggatacgcatgaggct

SEQ ID NO: 961 - DNA, 146 bp, Artificial Sequence
  Bisulfite Padlock Probe
  misc_feature 94, 95, 96, 97, 98, 99: n = A,T,C or G
gactggaagagcactgttaaaccaaaactacacttcctactcaacgttggaggctcatcgttcctattcaggcagatgttatcgaggtccgacnnnnnnctaaatctacccacgacccccacactcgatcggatacgcatgaggct

SEQ ID NO: 962 - DNA, 146 bp, Artificial Sequence
  Bisulfite Padlock Probe
  misc_feature 92, 93, 94, 95, 96, 97: n = A,T,C or G
gactggaagagcactgttaaaccaaacaaatacttctcatcccgttggaggctcatcgttcctattcaggcagatgttatcgaggtccgacnnnnnnaaaaactatttcttcaacctcctccccatgatcggatacgcatgaggct

SEQ ID NO: 963 - DNA, 146 bp, Artificial Sequence
  Bisulfite Padlock Probe
  misc_feature 93, 94, 95, 96, 97, 98: n = A,T,C or G
gactggaagagcactgttaaaccaaacacaaaacgcccaacaacgttggaggctcatcgttcctattcaggcagatgttatcgaggtccgacnnnnnnaaacccaaaactaccccacaataacaccgatcggatacgcatgaggct

SEQ ID NO: 964 - DNA, 146 bp, Artificial Sequence
  Bisulfite Padlock Probe
  misc_feature 93, 94, 95, 96, 97, 98: n = A,T,C or G
gactggaagagcactgttaaaccaaacacaaaacgcccgacaacgttggaggctcatcgttcctattcaggcagatgttatcgaggtccgacnnnnnnaaacccaaaactaccccacgataacaccgatcggatacgcatgaggct

SEQ ID NO: 965 - DNA, 146 bp, Artificial Sequence
  Bisulfite Padlock Probe
  misc_feature 92, 93, 94, 95, 96, 97: n = A,T,C or G
gactggaagagcactgttaaaccaacaacaacccgtacccaaagttggaggctcatcgttcctattcaggcagatgttatcgaggtccgacnnnnnncttcccaatattatttacaaactttactagatcggatacgcatgaggct

SEQ ID NO: 966 - DNA, 146 bp, Artificial Sequence
  Bisulfite Padlock Probe
  misc_feature 92, 93, 94, 95, 96, 97: n = A,T,C or G
gactggaagagcactgttaaaccaacaacaacccgtacccgaagttggaggctcatcgttcctattcaggcagatgttatcgaggtccgacnnnnnncttcccgatattatttacaaactttactagatcggatacgcatgaggct

SEQ ID NO: 967 - DNA, 146 bp, Artificial Sequence
  Bisulfite Padlock Probe
  misc_feature 93, 94, 95, 96, 97, 98: n = A,T,C or G
gactggaagagcactgttaaaccaataaataaaaccacaaaaccgttggaggctcatcgttcctattcaggcagatgttatcgaggtccgacnnnnnncacaacctctcgtcacctcaaaaacctcgatcggatacgcatgaggct

SEQ ID NO: 968 - DNA, 146 bp, Artificial Sequence
  Bisulfite Padlock Probe
  misc_feature 92, 93, 94, 95, 96, 97: n = A,T,C or G
gactggaagagcactgttaaaccacgaatccaaaaataaaaacgttggaggctcatcgttcctattcaggcagatgttatcgaggtccgacnnnnnntaaaatcaaaatatctccgtctccaaaaagatcggatacgcatgaggct

SEQ ID NO: 969 - DNA, 146 bp, Artificial Sequence
  Bisulfite Padlock Probe
  misc_feature 92, 93, 94, 95, 96, 97: n = A,T,C or G
gactggaagagcactgttaaaccacgaatccgaaaataaaaacgttggaggctcatcgttcctattcaggcagatgttatcgaggtccgacnnnnnntaaaatcaaaatatctccgtctccgaaaagatcggatacgcatgaggct

SEQ ID NO: 970 - DNA, 146 bp, Artificial Sequence
  Bisulfite Padlock Probe
  misc_feature 93, 94, 95, 96, 97, 98: n = A,T,C or G
gactggaagagcactgttaaaccactcgaactacaactaataatgttggaggctcatcgttcctattcaggcagatgttatcgaggtccgacnnnnnnaaattctataccctaacaaattcacaaagatcggatacgcatgaggct

SEQ ID NO: 971 - DNA, 146 bp, Artificial Sequence
  Bisulfite Padlock Probe
  misc_feature 93, 94, 95, 96, 97, 98: n = A,T,C or G
gactggaagagcactgttaaaccactcgaactacgactaataatgttggaggctcatcgttcctattcaggcagatgttatcgaggtccgacnnnnnnaaattctataccctaacaaattcacaaagatcggatacgcatgaggct

SEQ ID NO: 972 - DNA, 146 bp, Artificial Sequence
  Bisulfite Padlock Probe
  misc_feature 96, 97, 98, 99, 100, 101: n = A,T,C or G
gactggaagagcactgttaaaccataaaaactactactaccaaaaccgttggaggctcatcgttcctattcaggcagatgttatcgaggtccgacnnnnnnaaaaacaaacttattattaaaaatcgatcggatacgcatgaggct

SEQ ID NO: 973 - DNA, 146 bp, Artificial Sequence
  Bisulfite Padlock Probe
  misc_feature 96, 97, 98, 99, 100, 101: n = A,T,C or G
gactggaagagcactgttaaaccataaaaatcctaccaataataatcgttggaggctcatcgttcctattcaggcagatgttatcgaggtccgacnnnnnncaacctcccccaaaacccctacaacgatcggatacgcatgaggct

SEQ ID NO: 974 - DNA, 146 bp, Artificial Sequence
  Bisulfite Padlock Probe
  misc_feature 96, 97, 98, 99, 100, 101: n = A,T,C or G
gactggaagagcactgttaaaccataaaaatcctaccgataataatcgttggaggctcatcgttcctattcaggcagatgttatcgaggtccgacnnnnnncaacctcccccaaaacccctacgacgatcggatacgcatgaggct

SEQ ID NO: 975 - DNA, 146 bp, Artificial Sequence
  Bisulfite Padlock Probe
  misc_feature 94, 95, 96, 97, 98, 99: n = A,T,C or G
gactggaagagcactgttaaacccaaaaactcacctacactaaccgttggaggctcatcgttcctattcaggcagatgttatcgaggtccgacnnnnnnatactaacacgcatatacacacacaaagatcggatacgcatgaggct

SEQ ID NO: 976 - DNA, 146 bp, Artificial Sequence
  Bisulfite Padlock Probe
  misc_feature 92, 93, 94, 95, 96, 97: n = A,T,C or G
gactggaagagcactgttaaacccaaacctctacataaaattcgttggaggctcatcgttcctattcaggcagatgttatcgaggtccgacnnnnnncctaaccctaaattctaaaaactaaaaacgatcggatacgcatgaggct

SEQ ID NO: 977 - DNA, 146 bp, Artificial Sequence
  Bisulfite Padlock Probe
  misc_feature 92, 93, 94, 95, 96, 97: n = A,T,C or G
gactggaagagcactgttaaacccaaatcttactccccattaagttggaggctcatcgttcctattcaggcagatgttatcgaggtccgacnnnnnnattaaccaaactacgcaaatattttatacgatcggatacgcatgaggct

SEQ ID NO: 978 - DNA, 146 bp, Artificial Sequence
  Bisulfite Padlock Probe
  misc_feature 92, 93, 94, 95, 96, 97: n = A,T,C or G
gactggaagagcactgttaaacccaactaaaaataaacaaaaagttggaggctcatcgttcctattcaggcagatgttatcgaggtccgacnnnnnnaacaaaaccgcaaatctaaaacccccaacgatcggatacgcatgaggct

SEQ ID NO: 979 - DNA, 146 bp, Artificial Sequence
  Bisulfite Padlock Probe
  misc_feature 92, 93, 94, 95, 96, 97: n = A,T,C or G
gactggaagagcactgttaaacccaactaaaaataaacaaaaagttggaggctcatcgttcctattcaggcagatgttatcgaggtccgacnnnnnnaacaaaaccgcgaatctaaaacccccaacgatcggatacgcatgaggct

SEQ ID NO: 980 - DNA, 146 bp, Artificial Sequence
  Bisulfite Padlock Probe
  misc_feature 96, 97, 98, 99, 100, 101: n = A,T,C or G
gactggaagagcactgttaaacccacatcaaattaaatttacaactcgttggaggctcatcgttcctattcaggcagatgttatcgaggtccgacnnnnnnaaaaactaaataccgaaaccgtccagatcggatacgcatgaggct

SEQ ID NO: 981 - DNA, 146 bp, Artificial Sequence
  Bisulfite Padlock Probe
  misc_feature 96, 97, 98, 99, 100, 101: n = A,T,C or G
gactggaagagcactgttaaacccacgtcaaattaaatttacaactcgttggaggctcatcgttcctattcaggcagatgttatcgaggtccgacnnnnnnaaaaactaaataccgaaaccgtccggatcggatacgcatgaggct

SEQ ID NO: 982 - DNA, 146 bp, Artificial Sequence
  Bisulfite Padlock Probe
  misc_feature 96, 97, 98, 99, 100, 101: n = A,T,C or G
gactggaagagcactgttaaacccactccaacaataaaaacccaaacgttggaggctcatcgttcctattcaggcagatgttatcgaggtccgacnnnnnnaaaaacgaataaatcccgcccaaccgatcggatacgcatgaggct

SEQ ID NO: 983 - DNA, 146 bp, Artificial Sequence
  Bisulfite Padlock Probe
  misc_feature 94, 95, 96, 97, 98, 99: n = A,T,C or G
gactggaagagcactgttaaaccccaaaacacaaaacataaacccgttggaggctcatcgttcctattcaggcagatgttatcgaggtccgacnnnnnnaaactccttccaaaacctcaaacctttgatcggatacgcatgaggct

SEQ ID NO: 984 - DNA, 146 bp, Artificial Sequence
  Bisulfite Padlock Probe
  misc_feature 94, 95, 96, 97, 98, 99: n = A,T,C or G
gactggaagagcactgttaaaccccaaaacgcaaaacataaacccgttggaggctcatcgttcctattcaggcagatgttatcgaggtccgacnnnnnnaaactccttccaaaacctcgaacctttgatcggatacgcatgaggct

SEQ ID NO: 985 - DNA, 146 bp, Artificial Sequence
  Bisulfite Padlock Probe
  misc_feature 96, 97, 98, 99, 100, 101: n = A,T,C or G
gactggaagagcactgttaaaccccaataactaaactccaaatacctgttggaggctcatcgttcctattcaggcagatgttatcgaggtccgacnnnnnngaccctacacctcacccctactcaagatcggatacgcatgaggct

SEQ ID NO: 986 - DNA, 146 bp, Artificial Sequence
  Bisulfite Padlock Probe
  misc_feature 96, 97, 98, 99, 100, 101: n = A,T,C or G
gactggaagagcactgttaaaccccaataactaaactccaaatacctgttggaggctcatcgttcctattcaggcagatgttatcgaggtccgacnnnnnngaccctacgcctcacccctactcaagatcggatacgcatgaggct

SEQ ID NO: 987 - DNA, 146 bp, Artificial Sequence
  Bisulfite Padlock Probe
  misc_feature 92, 93, 94, 95, 96, 97: n = A,T,C or G
gactggaagagcactgttaaaccccaatacgcccccaaaaaacgttggaggctcatcgttcctattcaggcagatgttatcgaggtccgacnnnnnnccaacacccaattaataaaaataatacccgatcggatacgcatgaggct

SEQ ID NO: 988 - DNA, 146 bp, Artificial Sequence
  Bisulfite Padlock Probe
  misc_feature 92, 93, 94, 95, 96, 97: n = A,T,C or G
gactggaagagcactgttaaaccccaatacgcccccgaaaaacgttggaggctcatcgttcctattcaggcagatgttatcgaggtccgacnnnnnnccaacacccgattaataaaaataatacccgatcggatacgcatgaggct

SEQ ID NO: 989 - DNA, 146 bp, Artificial Sequence
  Bisulfite Padlock Probe
  misc_feature 92, 93, 94, 95, 96, 97: n = A,T,C or G
gactggaagagcactgttaaaccccattcctaatcctcaaaacgttggaggctcatcgttcctattcaggcagatgttatcgaggtccgacnnnnnnaactactaaccaaaatacacacaataccagatcggatacgcatgaggct

SEQ ID NO: 990 - DNA, 146 bp, Artificial Sequence
  Bisulfite Padlock Probe
  misc_feature 92, 93, 94, 95, 96, 97: n = A,T,C or G
gactggaagagcactgttaaaccccattcctaatcctcgaaacgttggaggctcatcgttcctattcaggcagatgttatcgaggtccgacnnnnnnaactactaaccaaaatacgcacaataccagatcggatacgcatgaggct

SEQ ID NO: 991 - DNA, 146 bp, Artificial Sequence
  Bisulfite Padlock Probe
  misc_feature 93, 94, 95, 96, 97, 98: n = A,T,C or G
gactggaagagcactgttaaaccccgaactccaaaaaccataccgttggaggctcatcgttcctattcaggcagatgttatcgaggtccgacnnnnnnctcccgcctcaatccctacctctaaaaagatcggatacgcatgaggct

SEQ ID NO: 992 - DNA, 146 bp, Artificial Sequence
  Bisulfite Padlock Probe
  misc_feature 93, 94, 95, 96, 97, 98: n = A,T,C or G
gactggaagagcactgttaaaccccgaactccgaaaaccataccgttggaggctcatcgttcctattcaggcagatgttatcgaggtccgacnnnnnnctcccgcctcgatccctacctctaaaaagatcggatacgcatgaggct

SEQ ID NO: 993 - DNA, 146 bp, Artificial Sequence
  Bisulfite Padlock Probe
  misc_feature 92, 93, 94, 95, 96, 97: n = A,T,C or G
gactggaagagcactgttaaaccccgaatacttcgccgaaacagttggaggctcatcgttcctattcaggcagatgttatcgaggtccgacnnnnnnaaaaactactaccgcctaacaaaactcccgatcggatacgcatgaggct

SEQ ID NO: 994 - DNA, 146 bp, Artificial Sequence
  Bisulfite Padlock Probe
  misc_feature 92, 93, 94, 95, 96, 97: n = A,T,C or G
gactggaagagcactgttaaaccccgaatacttcgccgaaacggttggaggctcatcgttcctattcaggcagatgttatcgaggtccgacnnnnnnaaaaactactaccgcctaacgaaactcccgatcggatacgcatgaggct

SEQ ID NO: 995 - DNA, 146 bp, Artificial Sequence
  Bisulfite Padlock Probe
  misc_feature 95, 96, 97, 98, 99, 100: n = A,T,C or G
gactggaagagcactgttaaaccccgacgaataacgacacaaaaacgttggaggctcatcgttcctattcaggcagatgttatcgaggtccgacnnnnnncaataaaacaaccccctcccttttccgatcggatacgcatgaggct

SEQ ID NO: 996 - DNA, 146 bp, Artificial Sequence
  Bisulfite Padlock Probe
  misc_feature 95, 96, 97, 98, 99, 100: n = A,T,C or G
gactggaagagcactgttaaaccccgacgaataacgacgcaaaaacgttggaggctcatcgttcctattcaggcagatgttatcgaggtccgacnnnnnncaataaaacgaccccctcccttttccgatcggatacgcatgaggct

SEQ ID NO: 997 - DNA, 146 bp, Artificial Sequence
  Bisulfite Padlock Probe
  misc_feature 94, 95, 96, 97, 98, 99: n = A,T,C or G
gactggaagagcactgttaaacccctaaaattctaattaataaatgttggaggctcatcgttcctattcaggcagatgttatcgaggtccgacnnnnnnaaaatataaaactaaaatcttaaaatcgatcggatacgcatgaggct

SEQ ID NO: 998 - DNA, 146 bp, Artificial Sequence
  Bisulfite Padlock Probe
  misc_feature 93, 94, 95, 96, 97, 98: n = A,T,C or G
gactggaagagcactgttaaacccctaaccaaaaaccccaaaccgttggaggctcatcgttcctattcaggcagatgttatcgaggtccgacnnnnnncaacaaaatcaccataaccaaaccaaacgatcggatacgcatgaggct

SEQ ID NO: 999 - DNA, 146 bp, Artificial Sequence
  Bisulfite Padlock Probe
  misc_feature 93, 94, 95, 96, 97, 98: n = A,T,C or G
gactggaagagcactgttaaacccctaaccgaaaaccccaaaccgttggaggctcatcgttcctattcaggcagatgttatcgaggtccgacnnnnnncaacgaaatcaccataaccaaaccaaacgatcggatacgcatgaggct

SEQ ID NO: 1000 - DNA, 146 bp, Artificial Sequence
  Bisulfite Padlock Probe
  misc_feature 94, 95, 96, 97, 98, 99: n = A,T,C or G
gactggaagagcactgttaaacccgaaaactcacctacactaaccgttggaggctcatcgttcctattcaggcagatgttatcgaggtccgacnnnnnnatactaacacgcgtatacacacacaaagatcggatacgcatgaggct

SEQ ID NO: 1001 - DNA, 146 bp, Artificial Sequence
  Bisulfite Padlock Probe
  misc_feature 94, 95, 96, 97, 98, 99: n = A,T,C or G
gactggaagagcactgttaaacccgaacaaaactaactaaataacgttggaggctcatcgttcctattcaggcagatgttatcgaggtccgacnnnnnnaaaaacctaaaacctctcccgcccatcgatcggatacgcatgaggct

SEQ ID NO: 1002 - DNA, 146 bp, Artificial Sequence
  Bisulfite Padlock Probe
  misc_feature 94, 95, 96, 97, 98, 99: n = A,T,C or G
gactggaagagcactgttaaacccgaacgaaactaactaaataacgttggaggctcatcgttcctattcaggcagatgttatcgaggtccgacnnnnnnaaaaacctaaaacctctcccgcccgtcgatcggatacgcatgaggct

SEQ ID NO: 1003 - DNA, 146 bp, Artificial Sequence
  Bisulfite Padlock Probe
  misc_feature 92, 93, 94, 95, 96, 97: n = A,T,C or G
gactggaagagcactgttaaacccgaatcttactccccattaagttggaggctcatcgttcctattcaggcagatgttatcgaggtccgacnnnnnnattaaccaaactacgcgaatattttatacgatcggatacgcatgaggct

SEQ ID NO: 1004 - DNA, 146 bp, Artificial Sequence
  Bisulfite Padlock Probe
  misc_feature 96, 97, 98, 99, 100, 101: n = A,T,C or G
gactggaagagcactgttaaacccgctccaacaataaaaacccaaacgttggaggctcatcgttcctattcaggcagatgttatcgaggtccgacnnnnnnaaaaacgaataaatcccgcccgaccgatcggatacgcatgaggct

SEQ ID NO: 1005 - DNA, 146 bp, Artificial Sequence
  Bisulfite Padlock Probe
  misc_feature 92, 93, 94, 95, 96, 97: n = A,T,C or G
gactggaagagcactgttaaaccctactaactataataaaaccgttggaggctcatcgttcctattcaggcagatgttatcgaggtccgacnnnnnnaacaacctacaaaacctaaacctaacctcgatcggatacgcatgaggct

SEQ ID NO: 1006 - DNA, 146 bp, Artificial Sequence
  Bisulfite Padlock Probe
  misc_feature 92, 93, 94, 95, 96, 97: n = A,T,C or G
gactggaagagcactgttaaaccctactaactataataaaaccgttggaggctcatcgttcctattcaggcagatgttatcgaggtccgacnnnnnnaacaacctacgaaacctaaacctaacctcgatcggatacgcatgaggct

SEQ ID NO: 1007 - DNA, 146 bp, Artificial Sequence
  Bisulfite Padlock Probe
  misc_feature 92, 93, 94, 95, 96, 97: n = A,T,C or G
gactggaagagcactgttaaaccctatattaaaaccacaaaacgttggaggctcatcgttcctattcaggcagatgttatcgaggtccgacnnnnnntacaaaccaaattaccctctccaaactaagatcggatacgcatgaggct

SEQ ID NO: 1008 - DNA, 146 bp, Artificial Sequence
  Bisulfite Padlock Probe
  misc_feature 92, 93, 94, 95, 96, 97: n = A,T,C or G
gactggaagagcactgttaaaccctatattaaaaccacgaaacgttggaggctcatcgttcctattcaggcagatgttatcgaggtccgacnnnnnntacaaaccaaattaccctctccgaactaagatcggatacgcatgaggct

SEQ ID NO: 1009 - DNA, 146 bp, Artificial Sequence
  Bisulfite Padlock Probe
  misc_feature 94, 95, 96, 97, 98, 99: n = A,T,C or G
gactggaagagcactgttaaaccctatctcctcaaacaccctctcgttggaggctcatcgttcctattcaggcagatgttatcgaggtccgacnnnnnncaccaacacgaacaaccgatacacctagatcggatacgcatgaggct

SEQ ID NO: 1010 - DNA, 146 bp, Artificial Sequence
  Bisulfite Padlock Probe
  misc_feature 94, 95, 96, 97, 98, 99: n = A,T,C or G
gactggaagagcactgttaaaccctatctcctcaaacgccctctcgttggaggctcatcgttcctattcaggcagatgttatcgaggtccgacnnnnnncaccaacacgaacaaccgatacgcctagatcggatacgcatgaggct

SEQ ID NO: 1011 - DNA, 146 bp, Artificial Sequence
  Bisulfite Padlock Probe
  misc_feature 96, 97, 98, 99, 100, 101: n = A,T,C or G
gactggaagagcactgttaaaccgaaaaaccgtaccgcaaaatctacgttggaggctcatcgttcctattcaggcagatgttatcgaggtccgacnnnnnnccgaccgaaaaacacaaacaacaccgatcggatacgcatgaggct

SEQ ID NO: 1012 - DNA, 146 bp, Artificial Sequence
  Bisulfite Padlock Probe
  misc_feature 96, 97, 98, 99, 100, 101: n = A,T,C or G
gactggaagagcactgttaaaccgaaaaaccgtaccgcgaaatctacgttggaggctcatcgttcctattcaggcagatgttatcgaggtccgacnnnnnnccgaccgaaaaacgcaaacaacaccgatcggatacgcatgaggct

SEQ ID NO: 1013 - DNA, 146 bp, Artificial Sequence
  Bisulfite Padlock Probe
  misc_feature 92, 93, 94, 95, 96, 97: n = A,T,C or G
gactggaagagcactgttaaaccgaaaaatctaaactataaccgttggaggctcatcgttcctattcaggcagatgttatcgaggtccgacnnnnnnacaaaacaacctcgcgaaactaaaaataagatcggatacgcatgaggct

SEQ ID NO: 1014 - DNA, 146 bp, Artificial Sequence
  Bisulfite Padlock Probe
  misc_feature 95, 96, 97, 98, 99, 100: n = A,T,C or G
gactggaagagcactgttaaaccgaaaaccgacctaaacacaaaaagttggaggctcatcgttcctattcaggcagatgttatcgaggtccgacnnnnnncccgtaaccctttataccaaacaaacgatcggatacgcatgaggct

SEQ ID NO: 1015 - DNA, 146 bp, Artificial Sequence
  Bisulfite Padlock Probe
  misc_feature 95, 96, 97, 98, 99, 100: n = A,T,C or G
gactggaagagcactgttaaaccgaaaaccgacctaaacgcaaaaagttggaggctcatcgttcctattcaggcagatgttatcgaggtccgacnnnnnncccgtaaccctttataccaaacgaacgatcggatacgcatgaggct

SEQ ID NO: 1016 - DNA, 146 bp, Artificial Sequence
  Bisulfite Padlock Probe
  misc_feature 94, 95, 96, 97, 98, 99: n = A,T,C or G
gactggaagagcactgttaaaccgaaaactaaccccaaataacccgttggaggctcatcgttcctattcaggcagatgttatcgaggtccgacnnnnnncccctataaacgaaacgaaacaacgtcgatcggatacgcatgaggct

SEQ ID NO: 1017 - DNA, 146 bp, Artificial Sequence
  Bisulfite Padlock Probe
  misc_feature 92, 93, 94, 95, 96, 97: n = A,T,C or G
gactggaagagcactgttaaaccgaaaccctaaacccaaaaccgttggaggctcatcgttcctattcaggcagatgttatcgaggtccgacnnnnnnatccgacaaaccgaccgaaaattattatcgatcggatacgcatgaggct

SEQ ID NO: 1018 - DNA, 146 bp, Artificial Sequence
  Bisulfite Padlock Probe
  misc_feature 92, 93, 94, 95, 96, 97: n = A,T,C or G
gactggaagagcactgttaaaccgaaaccgaaaccaccctaacgttggaggctcatcgttcctattcaggcagatgttatcgaggtccgacnnnnnnaaaaacaaaaactcgttaacttcacaaaagatcggatacgcatgaggct

SEQ ID NO: 1019 - DNA, 146 bp, Artificial Sequence
  Bisulfite Padlock Probe
  misc_feature 92, 93, 94, 95, 96, 97: n = A,T,C or G
gactggaagagcactgttaaaccgaaaccgaaaccgccctaacgttggaggctcatcgttcctattcaggcagatgttatcgaggtccgacnnnnnnaaaaacaaaaactcgttaacttcgcaaaagatcggatacgcatgaggct

SEQ ID NO: 1020 - DNA, 146 bp, Artificial Sequence
  Bisulfite Padlock Probe
  misc_feature 92, 93, 94, 95, 96, 97: n = A,T,C or G
gactggaagagcactgttaaaccgaaaccgacgatcaccctacgttggaggctcatcgttcctattcaggcagatgttatcgaggtccgacnnnnnncaacaacaaatatctacctccctaaaaacgatcggatacgcatgaggct

SEQ ID NO: 1021 - DNA, 146 bp, Artificial Sequence
  Bisulfite Padlock Probe
  misc_feature 92, 93, 94, 95, 96, 97: n = A,T,C or G
gactggaagagcactgttaaaccgaaaccgacgatcgccctacgttggaggctcatcgttcctattcaggcagatgttatcgaggtccgacnnnnnncgacaacaaatatctacctccctaaaaacgatcggatacgcatgaggct

SEQ ID NO: 1022 - DNA, 146 bp, Artificial Sequence
  Bisulfite Padlock Probe
  misc_feature 95, 96, 97, 98, 99, 100: n = A,T,C or G
gactggaagagcactgttaaaccgaaatcccgaaaccccataaaaagttggaggctcatcgttcctattcaggcagatgttatcgaggtccgacnnnnnnaaaaacccgaaacgacgcaaaaacccgatcggatacgcatgaggct

SEQ ID NO: 1023 - DNA, 146 bp, Artificial Sequence
  Bisulfite Padlock Probe
  misc_feature 95, 96, 97, 98, 99, 100: n = A,T,C or G
gactggaagagcactgttaaaccgaaatcccgaaaccccgtaaaaagttggaggctcatcgttcctattcaggcagatgttatcgaggtccgacnnnnnnaaaaacccgaaacgacgcgaaaacccgatcggatacgcatgaggct

SEQ ID NO: 1024 - DNA, 146 bp, Artificial Sequence
  Bisulfite Padlock Probe
  misc_feature 92, 93, 94, 95, 96, 97: n = A,T,C or G
gactggaagagcactgttaaaccgaacgaaaaccaaaaaattcgttggaggctcatcgttcctattcaggcagatgttatcgaggtccgacnnnnnnacaactaataacccctactccacccaaaagatcggatacgcatgaggct

SEQ ID NO: 1025 - DNA, 146 bp, Artificial Sequence
  Bisulfite Padlock Probe
  misc_feature 92, 93, 94, 95, 96, 97: n = A,T,C or G
gactggaagagcactgttaaaccgaacgaaaaccgaaaaattcgttggaggctcatcgttcctattcaggcagatgttatcgaggtccgacnnnnnnacaactaataacccctactccgcccaaaagatcggatacgcatgaggct

SEQ ID NO: 1026 - DNA, 146 bp, Artificial Sequence
  Bisulfite Padlock Probe
  misc_feature 92, 93, 94, 95, 96, 97: n = A,T,C or G
gactggaagagcactgttaaaccgaacgtcgaaaccacacatcgttggaggctcatcgttcctattcaggcagatgttatcgaggtccgacnnnnnnaaacaaaacaaaacgaacgtcccaacaaagatcggatacgcatgaggct

SEQ ID NO: 1027 - DNA, 146 bp, Artificial Sequence
  Bisulfite Padlock Probe
  misc_feature 92, 93, 94, 95, 96, 97: n = A,T,C or G
gactggaagagcactgttaaaccgaacgtcgaaaccacacgtcgttggaggctcatcgttcctattcaggcagatgttatcgaggtccgacnnnnnnaaacaaaacaaaacgaacgtcccgacaaagatcggatacgcatgaggct

SEQ ID NO: 1028 - DNA, 146 bp, Artificial Sequence
  Bisulfite Padlock Probe
  misc_feature 93, 94, 95, 96, 97, 98: n = A,T,C or G
gactggaagagcactgttaaaccgataaataaaaccacaaaaccgttggaggctcatcgttcctattcaggcagatgttatcgaggtccgacnnnnnncacaacctctcgtcacctcgaaaacctcgatcggatacgcatgaggct

SEQ ID NO: 1029 - DNA, 146 bp, Artificial Sequence
  Bisulfite Padlock Probe
  misc_feature 93, 94, 95, 96, 97, 98: n = A,T,C or G
gactggaagagcactgttaaaccgccacacacaaaaatacaaaagttggaggctcatcgttcctattcaggcagatgttatcgaggtccgacnnnnnnactacgcaatcgcaataatactactacagatcggatacgcatgaggct

SEQ ID NO: 1030 - DNA, 146 bp, Artificial Sequence
  Bisulfite Padlock Probe
  misc_feature 93, 94, 95, 96, 97, 98: n = A,T,C or G
gactggaagagcactgttaaaccgccacgcacaaaaatacaaaagttggaggctcatcgttcctattcaggcagatgttatcgaggtccgacnnnnnnactacgcaatcgcgataatactactacagatcggatacgcatgaggct

SEQ ID NO: 1031 - DNA, 146 bp, Artificial Sequence
  Bisulfite Padlock Probe
  misc_feature 96, 97, 98, 99, 100, 101: n = A,T,C or G
gactggaagagcactgttaaaccgcgaaactaaacgacaaaacaaacgttggaggctcatcgttcctattcaggcagatgttatcgaggtccgacnnnnnnctccctccccgcacctttaatactcgatcggatacgcatgaggct

SEQ ID NO: 1032 - DNA, 146 bp, Artificial Sequence
  Bisulfite Padlock Probe
  misc_feature 96, 97, 98, 99, 100, 101: n = A,T,C or G
gactggaagagcactgttaaaccgcgaaactaaacgacgaaacaaacgttggaggctcatcgttcctattcaggcagatgttatcgaggtccgacnnnnnnctccctccccgcgcctttaatactcgatcggatacgcatgaggct

SEQ ID NO: 1033 - DNA, 146 bp, Artificial Sequence
  Bisulfite Padlock Probe
  misc_feature 92, 93, 94, 95, 96, 97: n = A,T,C or G
gactggaagagcactgttaaaccgctaccgaaaaaccccaaacgttggaggctcatcgttcctattcaggcagatgttatcgaggtccgacnnnnnncgaaaacaaaaataacaaaaccttctcatgatcggatacgcatgaggct

SEQ ID NO: 1034 - DNA, 146 bp, Artificial Sequence
  Bisulfite Padlock Probe
  misc_feature 92, 93, 94, 95, 96, 97: n = A,T,C or G
gactggaagagcactgttaaaccgctaccgaaaaaccccgaacgttggaggctcatcgttcctattcaggcagatgttatcgaggtccgacnnnnnncgaaaacaaaaataacgaaaccttctcatgatcggatacgcatgaggct

SEQ ID NO: 1035 - DNA, 146 bp, Artificial Sequence
  Bisulfite Padlock Probe
  misc_feature 92, 93, 94, 95, 96, 97: n = A,T,C or G
gactggaagagcactgttaaaccgctccgaaacccacaaataagttggaggctcatcgttcctattcaggcagatgttatcgaggtccgacnnnnnnaataccaaccgcaacccaaaatataaatagatcggatacgcatgaggct

SEQ ID NO: 1036 - DNA, 146 bp, Artificial Sequence
  Bisulfite Padlock Probe
  misc_feature 92, 93, 94, 95, 96, 97: n = A,T,C or G
gactggaagagcactgttaaaccgctccgaaacccgcaaataagttggaggctcatcgttcctattcaggcagatgttatcgaggtccgacnnnnnnaataccaaccgcaacccgaaatataaatagatcggatacgcatgaggct

SEQ ID NO: 1037 - DNA, 146 bp, Artificial Sequence
  Bisulfite Padlock Probe
  misc_feature 92, 93, 94, 95, 96, 97: n = A,T,C or G
gactggaagagcactgttaaaccgcttatccccaacacaaaaagttggaggctcatcgttcctattcaggcagatgttatcgaggtccgacnnnnnncttccgaaaacaaccaaaacctaaacctagatcggatacgcatgaggct

SEQ ID NO: 1038 - DNA, 146 bp, Artificial Sequence
  Bisulfite Padlock Probe
  misc_feature 92, 93, 94, 95, 96, 97: n = A,T,C or G
gactggaagagcactgttaaaccgcttatccccaacgcaaaaagttggaggctcatcgttcctattcaggcagatgttatcgaggtccgacnnnnnncttccgaaaacaaccgaaacctaaacctagatcggatacgcatgaggct

SEQ ID NO: 1039 - DNA, 146 bp, Artificial Sequence
  Bisulfite Padlock Probe
  misc_feature 96, 97, 98, 99, 100, 101: n = A,T,C or G
gactggaagagcactgttaaaccgtaaaaactactactaccaaaaccgttggaggctcatcgttcctattcaggcagatgttatcgaggtccgacnnnnnnaaaaacaaacttattattaaaaatcgatcggatacgcatgaggct

SEQ ID NO: 1040 - DNA, 146 bp, Artificial Sequence
  Bisulfite Padlock Probe
  misc_feature 92, 93, 94, 95, 96, 97: n = A,T,C or G
gactggaagagcactgttaaaccgtatacgacgactcgacacagttggaggctcatcgttcctattcaggcagatgttatcgaggtccgacnnnnnnaaccccttcaaaccccaataccctaatccgatcggatacgcatgaggct

SEQ ID NO: 1041 - DNA, 146 bp, Artificial Sequence
  Bisulfite Padlock Probe
  misc_feature 92, 93, 94, 95, 96, 97: n = A,T,C or G
gactggaagagcactgttaaaccgtatacgacgactcgacgcagttggaggctcatcgttcctattcaggcagatgttatcgaggtccgacnnnnnnaaccccttcaaaccccaataccctaatccgatcggatacgcatgaggct

SEQ ID NO: 1042 - DNA, 146 bp, Artificial Sequence
  Bisulfite Padlock Probe
  misc_feature 96, 97, 98, 99, 100, 101: n = A,T,C or G
gactggaagagcactgttaaaccgtcgaaactaaacgacaatatatcgttggaggctcatcgttcctattcaggcagatgttatcgaggtccgacnnnnnnacgaaaaacaccaaacccaaaactagatcggatacgcatgaggct

SEQ ID NO: 1043 - DNA, 146 bp, Artificial Sequence
  Bisulfite Padlock Probe
  misc_feature 96, 97, 98, 99, 100, 101: n = A,T,C or G
gactggaagagcactgttaaaccgtcgaaactaaacgacgatatatcgttggaggctcatcgttcctattcaggcagatgttatcgaggtccgacnnnnnnacgaaaaacgccaaacccaaaactagatcggatacgcatgaggct

SEQ ID NO: 1044 - DNA, 146 bp, Artificial Sequence
  Bisulfite Padlock Probe
  misc_feature 95, 96, 97, 98, 99, 100: n = A,T,C or G
gactggaagagcactgttaaaccgtttccttattacccaactcaccgttggaggctcatcgttcctattcaggcagatgttatcgaggtccgacnnnnnnaactaaaatccgaacgcgaccccaaagatcggatacgcatgaggct

SEQ ID NO: 1045 - DNA, 146 bp, Artificial Sequence
  Bisulfite Padlock Probe
  misc_feature 95, 96, 97, 98, 99, 100: n = A,T,C or G
gactggaagagcactgttaaaccgtttccttattacccaactcgccgttggaggctcatcgttcctattcaggcagatgttatcgaggtccgacnnnnnnaactaaaatccgaacgcgaccccgaagatcggatacgcatgaggct

SEQ ID NO: 1046 - DNA, 146 bp, Artificial Sequence
  Bisulfite Padlock Probe
  misc_feature 96, 97, 98, 99, 100, 101: n = A,T,C or G
gactggaagagcactgttaaacctaaaaataaacaaacgaaccaaaagttggaggctcatcgttcctattcaggcagatgttatcgaggtccgacnnnnnnataactaaattcgtatttcgcacccgatcggatacgcatgaggct

SEQ ID NO: 1047 - DNA, 146 bp, Artificial Sequence
  Bisulfite Padlock Probe
  misc_feature 96, 97, 98, 99, 100, 101: n = A,T,C or G
gactggaagagcactgttaaacctaaaaataaacaaacgaaccgaaagttggaggctcatcgttcctattcaggcagatgttatcgaggtccgacnnnnnnataactaaattcgtatttcgcgcccgatcggatacgcatgaggct

SEQ ID NO: 1048 - DNA, 146 bp, Artificial Sequence
  Bisulfite Padlock Probe
  misc_feature 96, 97, 98, 99, 100, 101: n = A,T,C or G
gactggaagagcactgttaaacctaaaaatctattactaaaatacacgttggaggctcatcgttcctattcaggcagatgttatcgaggtccgacnnnnnnaaaaacaacgtaatacgaccgcaccgatcggatacgcatgaggct

SEQ ID NO: 1049 - DNA, 146 bp, Artificial Sequence
  Bisulfite Padlock Probe
  misc_feature 96, 97, 98, 99, 100, 101: n = A,T,C or G
gactggaagagcactgttaaacctaaaaatctattactaaaatacacgttggaggctcatcgttcctattcaggcagatgttatcgaggtccgacnnnnnnaaaaacaacgtaatacgaccgcgccgatcggatacgcatgaggct

SEQ ID NO: 1050 - DNA, 146 bp, Artificial Sequence
  Bisulfite Padlock Probe
  misc_feature 92, 93, 94, 95, 96, 97: n = A,T,C or G
gactggaagagcactgttaaacctaaaactcaccaccaaatatgttggaggctcatcgttcctattcaggcagatgttatcgaggtccgacnnnnnnctccacgaacaaccacaatttatttaaaagatcggatacgcatgaggct

SEQ ID NO: 1051 - DNA, 146 bp, Artificial Sequence
  Bisulfite Padlock Probe
  misc_feature 92, 93, 94, 95, 96, 97: n = A,T,C or G
gactggaagagcactgttaaacctaaaactcaccaccaaatatgttggaggctcatcgttcctattcaggcagatgttatcgaggtccgacnnnnnnctccacgaacaaccacgatttatttaaaagatcggatacgcatgaggct

SEQ ID NO: 1052 - DNA, 146 bp, Artificial Sequence
  Bisulfite Padlock Probe
  misc_feature 93, 94, 95, 96, 97, 98: n = A,T,C or G
gactggaagagcactgttaaacctaaaataaaactaaaaacaaagttggaggctcatcgttcctattcaggcagatgttatcgaggtccgacnnnnnntaattaaaatccctataaccaaaatttcgatcggatacgcatgaggct

SEQ ID NO: 1053 - DNA, 146 bp, Artificial Sequence
  Bisulfite Padlock Probe
  misc_feature 96, 97, 98, 99, 100, 101: n = A,T,C or G
gactggaagagcactgttaaacctaaaccctacgactcaataaaaccgttggaggctcatcgttcctattcaggcagatgttatcgaggtccgacnnnnnnaaaacgcgaacgacgacaaaaaaccgatcggatacgcatgaggct

SEQ ID NO: 1054 - DNA, 146 bp, Artificial Sequence
  Bisulfite Padlock Probe
  misc_feature 96, 97, 98, 99, 100, 101: n = A,T,C or G
gactggaagagcactgttaaacctaaaccctacgactcgataaaaccgttggaggctcatcgttcctattcaggcagatgttatcgaggtccgacnnnnnnaaaacgcgaacgacgacgaaaaaccgatcggatacgcatgaggct

SEQ ID NO: 1055 - DNA, 146 bp, Artificial Sequence
  Bisulfite Padlock Probe
  misc_feature 92, 93, 94, 95, 96, 97: n = A,T,C or G
gactggaagagcactgttaaacctaactacaaccaaacaaaaagttggaggctcatcgttcctattcaggcagatgttatcgaggtccgacnnnnnnacctaattaacaaaataatataaaaccccgatcggatacgcatgaggct

SEQ ID NO: 1056 - DNA, 146 bp, Artificial Sequence
  Bisulfite Padlock Probe
  misc_feature 92, 93, 94, 95, 96, 97: n = A,T,C or G
gactggaagagcactgttaaacctaactacaaccgaacaaaaagttggaggctcatcgttcctattcaggcagatgttatcgaggtccgacnnnnnnacctaattaacaaaataatataaaaccccgatcggatacgcatgaggct

SEQ ID NO: 1057 - DNA, 146 bp, Artificial Sequence
  Bisulfite Padlock Probe
  misc_feature 96, 97, 98, 99, 100, 101: n = A,T,C or G
gactggaagagcactgttaaacctacgctatacgcaaaaatcttctagttggaggctcatcgttcctattcaggcagatgttatcgaggtccgacnnnnnncgcaaaatcccatccacccaaaaaagatcggatacgcatgaggct

SEQ ID NO: 1058 - DNA, 146 bp, Artificial Sequence
  Bisulfite Padlock Probe
  misc_feature 96, 97, 98, 99, 100, 101: n = A,T,C or G
gactggaagagcactgttaaacctacgctatacgcgaaaatcttctagttggaggctcatcgttcctattcaggcagatgttatcgaggtccgacnnnnnncgcaaaatcccatccacccgaaaaagatcggatacgcatgaggct

SEQ ID NO: 1059 - DNA, 146 bp, Artificial Sequence
  Bisulfite Padlock Probe
  misc_feature 96, 97, 98, 99, 100, 101: n = A,T,C or G
gactggaagagcactgttaaacctactcataaacgacactaattcccgttggaggctcatcgttcctattcaggcagatgttatcgaggtccgacnnnnnncgtcttctcctacaaccacaaccccgatcggatacgcatgaggct

SEQ ID NO: 1060 - DNA, 146 bp, Artificial Sequence
  Bisulfite Padlock Probe
  misc_feature 96, 97, 98, 99, 100, 101: n = A,T,C or G
gactggaagagcactgttaaacctactcataaacgacgctaattcccgttggaggctcatcgttcctattcaggcagatgttatcgaggtccgacnnnnnncgtcttctcctacgaccacaaccccgatcggatacgcatgaggct

SEQ ID NO: 1061 - DNA, 146 bp, Artificial Sequence
  Bisulfite Padlock Probe
  misc_feature 94, 95, 96, 97, 98, 99: n = A,T,C or G
gactggaagagcactgttaaacctatcttcccaaaattaaaacccgttggaggctcatcgttcctattcaggcagatgttatcgaggtccgacnnnnnnaactacgcaactcactactcactaaaagatcggatacgcatgaggct

SEQ ID NO: 1062 - DNA, 146 bp, Artificial Sequence
  Bisulfite Padlock Probe
  misc_feature 94, 95, 96, 97, 98, 99: n = A,T,C or G
gactggaagagcactgttaaacctatcttcccaaaattaaaacccgttggaggctcatcgttcctattcaggcagatgttatcgaggtccgacnnnnnnaactacgcaactcgctactcactaaaagatcggatacgcatgaggct

SEQ ID NO: 1063 - DNA, 146 bp, Artificial Sequence
  Bisulfite Padlock Probe
  misc_feature 94, 95, 96, 97, 98, 99: n = A,T,C or G
gactggaagagcactgttaaacctcaaataccttcaccctaaaaagttggaggctcatcgttcctattcaggcagatgttatcgaggtccgacnnnnnnttaccaacaaaaacaaaatcccatcttgatcggatacgcatgaggct

SEQ ID NO: 1064 - DNA, 146 bp, Artificial Sequence
  Bisulfite Padlock Probe
  misc_feature 92, 93, 94, 95, 96, 97: n = A,T,C or G
gactggaagagcactgttaaacctcaacacaaaaactttaatagttggaggctcatcgttcctattcaggcagatgttatcgaggtccgacnnnnnnccaaacaacaatcctatcatcctaacaccgatcggatacgcatgaggct

SEQ ID NO: 1065 - DNA, 146 bp, Artificial Sequence
  Bisulfite Padlock Probe
  misc_feature 92, 93, 94, 95, 96, 97: n = A,T,C or G
gactggaagagcactgttaaacctcaacacaaaaactttaatagttggaggctcatcgttcctattcaggcagatgttatcgaggtccgacnnnnnnccaaacgacaatcctatcatcctaacaccgatcggatacgcatgaggct

SEQ ID NO: 1066 - DNA, 146 bp, Artificial Sequence
  Bisulfite Padlock Probe
  misc_feature 96, 97, 98, 99, 100, 101: n = A,T,C or G
gactggaagagcactgttaaacctcccgcaaccaaaacaaaactaacgttggaggctcatcgttcctattcaggcagatgttatcgaggtccgacnnnnnnccgaaaacaaaaataaataaaaaccgatcggatacgcatgaggct

SEQ ID NO: 1067 - DNA, 146 bp, Artificial Sequence
  Bisulfite Padlock Probe
  misc_feature 96, 97, 98, 99, 100, 101: n = A,T,C or G
gactggaagagcactgttaaacctcccgcaaccaaaacgaaactaacgttggaggctcatcgttcctattcaggcagatgttatcgaggtccgacnnnnnnccgaaaacgaaaataaataaaaaccgatcggatacgcatgaggct

SEQ ID NO: 1068 - DNA, 146 bp, Artificial Sequence
  Bisulfite Padlock Probe
  misc_feature 92, 93, 94, 95, 96, 97: n = A,T,C or G
gactggaagagcactgttaaacctccctacctccctacctcccgttggaggctcatcgttcctattcaggcagatgttatcgaggtccgacnnnnnnaaaacccaatctaaaaacccaacctaaaagatcggatacgcatgaggct

SEQ ID NO: 1069 - DNA, 146 bp, Artificial Sequence
  Bisulfite Padlock Probe
  misc_feature 93, 94, 95, 96, 97, 98: n = A,T,C or G
gactggaagagcactgttaaacctccgacgaaaacacgacaaacgttggaggctcatcgttcctattcaggcagatgttatcgaggtccgacnnnnnnctcgaaataacgactactcaacataaccgatcggatacgcatgaggct

SEQ ID NO: 1070 - DNA, 146 bp, Artificial Sequence
  Bisulfite Padlock Probe
  misc_feature 93, 94, 95, 96, 97, 98: n = A,T,C or G
gactggaagagcactgttaaacctccgacgaaaacacgacgaacgttggaggctcatcgttcctattcaggcagatgttatcgaggtccgacnnnnnnctcgaaataacgactactcgacataaccgatcggatacgcatgaggct

SEQ ID NO: 1071 - DNA, 146 bp, Artificial Sequence
  Bisulfite Padlock Probe
  misc_feature 96, 97, 98, 99, 100, 101: n = A,T,C or G
gactggaagagcactgttaaacctccttaacaaaaccccataatatcgttggaggctcatcgttcctattcaggcagatgttatcgaggtccgacnnnnnnaaaatcgccgttaaaactcaacaccgatcggatacgcatgaggct

SEQ ID NO: 1072 - DNA, 146 bp, Artificial Sequence
  Bisulfite Padlock Probe
  misc_feature 96, 97, 98, 99, 100, 101: n = A,T,C or G
gactggaagagcactgttaaacctccttaacgaaaccccataatatcgttggaggctcatcgttcctattcaggcagatgttatcgaggtccgacnnnnnnaaaatcgccgttaaaactcaacgccgatcggatacgcatgaggct

SEQ ID NO: 1073 - DNA, 146 bp, Artificial Sequence
  Bisulfite Padlock Probe
  misc_feature 94, 95, 96, 97, 98, 99: n = A,T,C or G
gactggaagagcactgttaaacctcgaataccttcaccctaaaaagttggaggctcatcgttcctattcaggcagatgttatcgaggtccgacnnnnnnttaccaacaaaaacaaaatcccatcttgatcggatacgcatgaggct

SEQ ID NO: 1074 - DNA, 146 bp, Artificial Sequence
  Bisulfite Padlock Probe
  misc_feature 92, 93, 94, 95, 96, 97: n = A,T,C or G
gactggaagagcactgttaaacctcgacgcccgactaaacatcgttggaggctcatcgttcctattcaggcagatgttatcgaggtccgacnnnnnnataccaaacctatacctcgcaatccaaaagatcggatacgcatgaggct

SEQ ID NO: 1075 - DNA, 146 bp, Artificial Sequence
  Bisulfite Padlock Probe
  misc_feature 92, 93, 94, 95, 96, 97: n = A,T,C or G
gactggaagagcactgttaaacctcgacgcccgactaaacgtcgttggaggctcatcgttcctattcaggcagatgttatcgaggtccgacnnnnnnataccaaacctatacctcgcgatccaaaagatcggatacgcatgaggct

SEQ ID NO: 1076 - DNA, 146 bp, Artificial Sequence
  Bisulfite Padlock Probe
  misc_feature 95, 96, 97, 98, 99, 100: n = A,T,C or G
gactggaagagcactgttaaacctctaaacgcacaaactcttcctcgttggaggctcatcgttcctattcaggcagatgttatcgaggtccgacnnnnnnacctcttcctcctcctcatcaataacgatcggatacgcatgaggct

SEQ ID NO: 1077 - DNA, 146 bp, Artificial Sequence
  Bisulfite Padlock Probe
  misc_feature 95, 96, 97, 98, 99, 100: n = A,T,C or G
gactggaagagcactgttaaacctctaaacgcacgaactcttcctcgttggaggctcatcgttcctattcaggcagatgttatcgaggtccgacnnnnnnacctcttcctcctcctcatcgataacgatcggatacgcatgaggct

SEQ ID NO: 1078 - DNA, 146 bp, Artificial Sequence
  Bisulfite Padlock Probe
  misc_feature 92, 93, 94, 95, 96, 97: n = A,T,C or G
gactggaagagcactgttaaacctctctaactacttcttccccgttggaggctcatcgttcctattcaggcagatgttatcgaggtccgacnnnnnnaaataaaactatctttacttataaaaaccgatcggatacgcatgaggct

SEQ ID NO: 1079 - DNA, 146 bp, Artificial Sequence
  Bisulfite Padlock Probe
  misc_feature 93, 94, 95, 96, 97, 98: n = A,T,C or G
gactggaagagcactgttaaacctcttcataaataaacataaccgttggaggctcatcgttcctattcaggcagatgttatcgaggtccgacnnnnnncttcccttaattcccaaactccatctcagatcggatacgcatgaggct

SEQ ID NO: 1080 - DNA, 146 bp, Artificial Sequence
  Bisulfite Padlock Probe
  misc_feature 93, 94, 95, 96, 97, 98: n = A,T,C or G
gactggaagagcactgttaaacctcttcataaataaacgtaaccgttggaggctcatcgttcctattcaggcagatgttatcgaggtccgacnnnnnncttcccttaattcccaaactccatctcagatcggatacgcatgaggct

SEQ ID NO: 1081 - DNA, 146 bp, Artificial Sequence
  Bisulfite Padlock Probe
  misc_feature 93, 94, 95, 96, 97, 98: n = A,T,C or G
gactggaagagcactgttaaacctcttccttccaaccaatctatgttggaggctcatcgttcctattcaggcagatgttatcgaggtccgacnnnnnnaacaaaaaacccaaaacaaaataaacacgatcggatacgcatgaggct

SEQ ID NO: 1082 - DNA, 146 bp, Artificial Sequence
  Bisulfite Padlock Probe
  misc_feature 93, 94, 95, 96, 97, 98: n = A,T,C or G
gactggaagagcactgttaaacctcttccttccaaccaatctatgttggaggctcatcgttcctattcaggcagatgttatcgaggtccgacnnnnnnaacgaaaaacccaaaacaaaataaacacgatcggatacgcatgaggct

SEQ ID NO: 1083 - DNA, 146 bp, Artificial Sequence
  Bisulfite Padlock Probe
  misc_feature 92, 93, 94, 95, 96, 97: n = A,T,C or G
gactggaagagcactgttaaacctttaaccaaactacaaaaaagttggaggctcatcgttcctattcaggcagatgttatcgaggtccgacnnnnnnacaacctaaaaacccaaactcatctaaaagatcggatacgcatgaggct

SEQ ID NO: 1084 - DNA, 146 bp, Artificial Sequence
  Bisulfite Padlock Probe
  misc_feature 92, 93, 94, 95, 96, 97: n = A,T,C or G
gactggaagagcactgttaaacctttaaccaaactacgaaaaagttggaggctcatcgttcctattcaggcagatgttatcgaggtccgacnnnnnnacaacctaaaaacccaaactcatctaaaagatcggatacgcatgaggct

SEQ ID NO: 1085 - DNA, 146 bp, Artificial Sequence
  Bisulfite Padlock Probe
  misc_feature 92, 93, 94, 95, 96, 97: n = A,T,C or G
gactggaagagcactgttaaacgaaaaacaacctaaaaaccccgttggaggctcatcgttcctattcaggcagatgttatcgaggtccgacnnnnnnattccgaactcaactcaataacacaacccgatcggatacgcatgaggct

SEQ ID NO: 1086 - DNA, 146 bp, Artificial Sequence
  Bisulfite Padlock Probe
  misc_feature 92, 93, 94, 95, 96, 97: n = A,T,C or G
gactggaagagcactgttaaacgaaaaacgacctaaaaaccccgttggaggctcatcgttcctattcaggcagatgttatcgaggtccgacnnnnnnattccgaactcaactcgataacacaacccgatcggatacgcatgaggct

SEQ ID NO: 1087 - DNA, 146 bp, Artificial Sequence
  Bisulfite Padlock Probe
  misc_feature 96, 97, 98, 99, 100, 101: n = A,T,C or G
gactggaagagcactgttaaacgaaaaactaaaaacaaaataacaacgttggaggctcatcgttcctattcaggcagatgttatcgaggtccgacnnnnnnccgaaacctaactcttctccaaatcgatcggatacgcatgaggct

SEQ ID NO: 1088 - DNA, 146 bp, Artificial Sequence
  Bisulfite Padlock Probe
  misc_feature 96, 97, 98, 99, 100, 101: n = A,T,C or G
gactggaagagcactgttaaacgaaaaactaaaaacgaaataacaacgttggaggctcatcgttcctattcaggcagatgttatcgaggtccgacnnnnnnccgaaacctaactcttctccgaatcgatcggatacgcatgaggct

SEQ ID NO: 1089 - DNA, 146 bp, Artificial Sequence
  Bisulfite Padlock Probe
  misc_feature 95, 96, 97, 98, 99, 100: n = A,T,C or G
gactggaagagcactgttaaacgaaaactccgaacaatactaaaaagttggaggctcatcgttcctattcaggcagatgttatcgaggtccgacnnnnnntcaccccactcccaatactactcacagatcggatacgcatgaggct

SEQ ID NO: 1090 - DNA, 146 bp, Artificial Sequence
  Bisulfite Padlock Probe
  misc_feature 95, 96, 97, 98, 99, 100: n = A,T,C or G
gactggaagagcactgttaaacgaaaactccgaacgatactaaaaagttggaggctcatcgttcctattcaggcagatgttatcgaggtccgacnnnnnntcaccccactcccgatactactcacagatcggatacgcatgaggct

SEQ ID NO: 1091 - DNA, 146 bp, Artificial Sequence
  Bisulfite Padlock Probe
  misc_feature 95, 96, 97, 98, 99, 100: n = A,T,C or G
gactggaagagcactgttaaacgaaaatccctcgatacccatcaccgttggaggctcatcgttcctattcaggcagatgttatcgaggtccgacnnnnnncgaccaaccgtccccaaaaacaaaaagatcggatacgcatgaggct

SEQ ID NO: 1092 - DNA, 146 bp, Artificial Sequence
  Bisulfite Padlock Probe
  misc_feature 95, 96, 97, 98, 99, 100: n = A,T,C or G
gactggaagagcactgttaaacgaaaatccctcgatacccatcgccgttggaggctcatcgttcctattcaggcagatgttatcgaggtccgacnnnnnncgaccaaccgtccccgaaaacaaaaagatcggatacgcatgaggct

SEQ ID NO: 1093 - DNA, 146 bp, Artificial Sequence
  Bisulfite Padlock Probe
  misc_feature 92, 93, 94, 95, 96, 97: n = A,T,C or G
gactggaagagcactgttaaacgaaaatctacccaactcaaccgttggaggctcatcgttcctattcaggcagatgttatcgaggtccgacnnnnnntccaataccttaaatcattcctataactcgatcggatacgcatgaggct

SEQ ID NO: 1094 - DNA, 146 bp, Artificial Sequence
  Bisulfite Padlock Probe
  misc_feature 92, 93, 94, 95, 96, 97: n = A,T,C or G
gactggaagagcactgttaaacgaaaatctacccaactcgaccgttggaggctcatcgttcctattcaggcagatgttatcgaggtccgacnnnnnntccaataccttaaatcattcctataactcgatcggatacgcatgaggct

SEQ ID NO: 1095 - DNA, 146 bp, Artificial Sequence
  Bisulfite Padlock Probe
  misc_feature 92, 93, 94, 95, 96, 97: n = A,T,C or G
gactggaagagcactgttaaacgaaacactaccctcgacacccgttggaggctcatcgttcctattcaggcagatgttatcgaggtccgacnnnnnnaccaccatcaccaacaacaacatcaacaagatcggatacgcatgaggct

SEQ ID NO: 1096 - DNA, 146 bp, Artificial Sequence
  Bisulfite Padlock Probe
  misc_feature 92, 93, 94, 95, 96, 97: n = A,T,C or G
gactggaagagcactgttaaacgaaacactaccctcgacgcccgttggaggctcatcgttcctattcaggcagatgttatcgaggtccgacnnnnnnaccaccatcaccaacaacaacatcaacaagatcggatacgcatgaggct

SEQ ID NO: 1097 - DNA, 146 bp, Artificial Sequence
  Bisulfite Padlock Probe
  misc_feature 93, 94, 95, 96, 97, 98: n = A,T,C or G
gactggaagagcactgttaaacgaaaccctaacccaaaaccaacgttggaggctcatcgttcctattcaggcagatgttatcgaggtccgacnnnnnnatacccaactacaaataacctaaaactagatcggatacgcatgaggct

SEQ ID NO: 1098 - DNA, 146 bp, Artificial Sequence
  Bisulfite Padlock Probe
  misc_feature 93, 94, 95, 96, 97, 98: n = A,T,C or G
gactggaagagcactgttaaacgaaaccctaacccgaaaccaacgttggaggctcatcgttcctattcaggcagatgttatcgaggtccgacnnnnnnatacccgactacaaataacctaaaactagatcggatacgcatgaggct

SEQ ID NO: 1099 - DNA, 146 bp, Artificial Sequence
  Bisulfite Padlock Probe
  misc_feature 93, 94, 95, 96, 97, 98: n = A,T,C or G
gactggaagagcactgttaaacgaaatactccacctaaccataagttggaggctcatcgttcctattcaggcagatgttatcgaggtccgacnnnnnnaccctccttatccacaaaacaccaacccgatcggatacgcatgaggct

SEQ ID NO: 1100 - DNA, 146 bp, Artificial Sequence
  Bisulfite Padlock Probe
  misc_feature 93, 94, 95, 96, 97, 98: n = A,T,C or G
gactggaagagcactgttaaacgaaatactccgcctaaccataagttggaggctcatcgttcctattcaggcagatgttatcgaggtccgacnnnnnnaccctccttatccacaaaacaccaacccgatcggatacgcatgaggct

SEQ ID NO: 1101 - DNA, 146 bp, Artificial Sequence
  Bisulfite Padlock Probe
  misc_feature 94, 95, 96, 97, 98, 99: n = A,T,C or G
gactggaagagcactgttaaacgaaattaaaaacctatcactatcgttggaggctcatcgttcctattcaggcagatgttatcgaggtccgacnnnnnnaaccccaaaatccccactatccctaccgatcggatacgcatgaggct

SEQ ID NO: 1102 - DNA, 146 bp, Artificial Sequence
  Bisulfite Padlock Probe
  misc_feature 94, 95, 96, 97, 98, 99: n = A,T,C or G
gactggaagagcactgttaaacgaaattaaaaacctatcgctatcgttggaggctcatcgttcctattcaggcagatgttatcgaggtccgacnnnnnnaaccccgaaatccccactatccctaccgatcggatacgcatgaggct

SEQ ID NO: 1103 - DNA, 146 bp, Artificial Sequence
  Bisulfite Padlock Probe
  misc_feature 94, 95, 96, 97, 98, 99: n = A,T,C or G
gactggaagagcactgttaaacgaacgaacgcaaacaaaaccaaagttggaggctcatcgttcctattcaggcagatgttatcgaggtccgacnnnnnnaaaaatatcaaactaacccgacacaacgatcggatacgcatgaggct

SEQ ID NO: 1104 - DNA, 146 bp, Artificial Sequence
  Bisulfite Padlock Probe
  misc_feature 94, 95, 96, 97, 98, 99: n = A,T,C or G
gactggaagagcactgttaaacgaacgaacgcgaacaaaaccaaagttggaggctcatcgttcctattcaggcagatgttatcgaggtccgacnnnnnnaaaaatatcaaactaacccgacacgacgatcggatacgcatgaggct

SEQ ID NO: 1105 - DNA, 146 bp, Artificial Sequence
  Bisulfite Padlock Probe
  misc_feature 94, 95, 96, 97, 98, 99: n = A,T,C or G
gactggaagagcactgttaaacgaacgaatcctaaaaacaaaaaagttggaggctcatcgttcctattcaggcagatgttatcgaggtccgacnnnnnnactcaaaatacacaactccacatcctagatcggatacgcatgaggct

SEQ ID NO: 1106 - DNA, 146 bp, Artificial Sequence
  Bisulfite Padlock Probe
  misc_feature 94, 95, 96, 97, 98, 99: n = A,T,C or G
gactggaagagcactgttaaacgaacgaatcctaaaaacgaaaaagttggaggctcatcgttcctattcaggcagatgttatcgaggtccgacnnnnnnactcaaaatacacaactccgcatcctagatcggatacgcatgaggct

SEQ ID NO: 1107 - DNA, 146 bp, Artificial Sequence
  Bisulfite Padlock Probe
  misc_feature 94, 95, 96, 97, 98, 99: n = A,T,C or G
gactggaagagcactgttaaacgaacgctccgaaatcaataaaacgttggaggctcatcgttcctattcaggcagatgttatcgaggtccgacnnnnnnaatttaataaaattaaaactttcaatcgatcggatacgcatgaggct

SEQ ID NO: 1108 - DNA, 146 bp, Artificial Sequence
  Bisulfite Padlock Probe
  misc_feature 94, 95, 96, 97, 98, 99: n = A,T,C or G
gactggaagagcactgttaaacgaacgctccgaaatcgataaaacgttggaggctcatcgttcctattcaggcagatgttatcgaggtccgacnnnnnnaatttaataaaattaaaactttcgatcgatcggatacgcatgaggct

SEQ ID NO: 1109 - DNA, 146 bp, Artificial Sequence
  Bisulfite Padlock Probe
  misc_feature 96, 97, 98, 99, 100, 101: n = A,T,C or G
gactggaagagcactgttaaacgaataacaaccccgcaaatcacaacgttggaggctcatcgttcctattcaggcagatgttatcgaggtccgacnnnnnncctaaaaacgaaaccgcaaaacaacgatcggatacgcatgaggct

SEQ ID NO: 1110 - DNA, 146 bp, Artificial Sequence
  Bisulfite Padlock Probe
  misc_feature 96, 97, 98, 99, 100, 101: n = A,T,C or G
gactggaagagcactgttaaacgaataacaaccccgcgaatcacaacgttggaggctcatcgttcctattcaggcagatgttatcgaggtccgacnnnnnncctaaaaacgaaaccgcgaaacaacgatcggatacgcatgaggct

SEQ ID NO: 1111 - DNA, 146 bp, Artificial Sequence
  Bisulfite Padlock Probe
  misc_feature 96, 97, 98, 99, 100, 101: n = A,T,C or G
gactggaagagcactgttaaacgacaacccaatacccactacaaaacgttggaggctcatcgttcctattcaggcagatgttatcgaggtccgacnnnnnnaatctcctcatcccgcaccaaaaacgatcggatacgcatgaggct

SEQ ID NO: 1112 - DNA, 146 bp, Artificial Sequence
  Bisulfite Padlock Probe
  misc_feature 96, 97, 98, 99, 100, 101: n = A,T,C or G
gactggaagagcactgttaaacgacaacccaatacccgctacaaaacgttggaggctcatcgttcctattcaggcagatgttatcgaggtccgacnnnnnnaatctcctcatcccgcaccgaaaacgatcggatacgcatgaggct

SEQ ID NO: 1113 - DNA, 146 bp, Artificial Sequence
  Bisulfite Padlock Probe
  misc_feature 92, 93, 94, 95, 96, 97: n = A,T,C or G
gactggaagagcactgttaaacgaccgcaaaaactccaacaacgttggaggctcatcgttcctattcaggcagatgttatcgaggtccgacnnnnnnacgcgctaaaaacgaacgcaaactaaaacgatcggatacgcatgaggct

SEQ ID NO: 1114 - DNA, 146 bp, Artificial Sequence
  Bisulfite Padlock Probe
  misc_feature 92, 93, 94, 95, 96, 97: n = A,T,C or G
gactggaagagcactgttaaacgaccgcaaaaactccaacgacgttggaggctcatcgttcctattcaggcagatgttatcgaggtccgacnnnnnnacgcgctaaaaacgaacgcgaactaaaacgatcggatacgcatgaggct

SEQ ID NO: 1115 - DNA, 146 bp, Artificial Sequence
  Bisulfite Padlock Probe
  misc_feature 92, 93, 94, 95, 96, 97: n = A,T,C or G
gactggaagagcactgttaaacgaccgcgaaaacatcaaatccgttggaggctcatcgttcctattcaggcagatgttatcgaggtccgacnnnnnngaccacctcttaatcctaaaactctaattgatcggatacgcatgaggct

SEQ ID NO: 1116 - DNA, 146 bp, Artificial Sequence
  Bisulfite Padlock Probe
  misc_feature 92, 93, 94, 95, 96, 97: n = A,T,C or G
gactggaagagcactgttaaacgaccgcgaaaacgtcaaatccgttggaggctcatcgttcctattcaggcagatgttatcgaggtccgacnnnnnngaccgcctcttaatcctaaaactctaattgatcggatacgcatgaggct

SEQ ID NO: 1117 - DNA, 146 bp, Artificial Sequence
  Bisulfite Padlock Probe
  misc_feature 92, 93, 94, 95, 96, 97: n = A,T,C or G
gactggaagagcactgttaaacgacgaaaaacgacaaaaaatagttggaggctcatcgttcctattcaggcagatgttatcgaggtccgacnnnnnnaaaaacacatacttctcccaaaacctcccgatcggatacgcatgaggct

SEQ ID NO: 1118 - DNA, 146 bp, Artificial Sequence
  Bisulfite Padlock Probe
  misc_feature 92, 93, 94, 95, 96, 97: n = A,T,C or G
gactggaagagcactgttaaacgacgaaaaacgacgaaaaatagttggaggctcatcgttcctattcaggcagatgttatcgaggtccgacnnnnnnaaaaacacgtacttctcccaaaacctcccgatcggatacgcatgaggct

SEQ ID NO: 1119 - DNA, 146 bp, Artificial Sequence
  Bisulfite Padlock Probe
  misc_feature 92, 93, 94, 95, 96, 97: n = A,T,C or G
gactggaagagcactgttaaacgacgcgtaaaacctacaaaacgttggaggctcatcgttcctattcaggcagatgttatcgaggtccgacnnnnnncaaacctccctacccaaccatttacctaagatcggatacgcatgaggct

SEQ ID NO: 1120 - DNA, 146 bp, Artificial Sequence
  Bisulfite Padlock Probe
  misc_feature 92, 93, 94, 95, 96, 97: n = A,T,C or G
gactggaagagcactgttaaacgacgcgtaaaacctacgaaacgttggaggctcatcgttcctattcaggcagatgttatcgaggtccgacnnnnnncaaacctccctacccaaccgtttacctaagatcggatacgcatgaggct

SEQ ID NO: 1121 - DNA, 146 bp, Artificial Sequence
  Bisulfite Padlock Probe
  misc_feature 96, 97, 98, 99, 100, 101: n = A,T,C or G
gactggaagagcactgttaaacgatataaataaccccaaaatccaaagttggaggctcatcgttcctattcaggcagatgttatcgaggtccgacnnnnnnatctctcgaacgacgacgcataaccgatcggatacgcatgaggct

SEQ ID NO: 1122 - DNA, 146 bp, Artificial Sequence
  Bisulfite Padlock Probe
  misc_feature 96, 97, 98, 99, 100, 101: n = A,T,C or G
gactggaagagcactgttaaacgatataaataaccccgaaatccaaagttggaggctcatcgttcctattcaggcagatgttatcgaggtccgacnnnnnnatctctcgaacgacgacgcgtaaccgatcggatacgcatgaggct

SEQ ID NO: 1123 - DNA, 146 bp, Artificial Sequence
  Bisulfite Padlock Probe
  misc_feature 95, 96, 97, 98, 99, 100: n = A,T,C or G
gactggaagagcactgttaaacgatccaaaaacactaaaccaaaaagttggaggctcatcgttcctattcaggcagatgttatcgaggtccgacnnnnnnttccacttcccaaccacctacaaaccgatcggatacgcatgaggct

SEQ ID NO: 1124 - DNA, 146 bp, Artificial Sequence
  Bisulfite Padlock Probe
  misc_feature 94, 95, 96, 97, 98, 99: n = A,T,C or G
gactggaagagcactgttaaacgcaaaaataaactctctaaaaccgttggaggctcatcgttcctattcaggcagatgttatcgaggtccgacnnnnnntataaaacaacctatactccccatctcgatcggatacgcatgaggct

SEQ ID NO: 1125 - DNA, 146 bp, Artificial Sequence
  Bisulfite Padlock Probe
  misc_feature 92, 93, 94, 95, 96, 97: n = A,T,C or G
gactggaagagcactgttaaacgcaaaatccgaaacctcaaccgttggaggctcatcgttcctattcaggcagatgttatcgaggtccgacnnnnnnactaacgcaccaaaaactccaacaaacaagatcggatacgcatgaggct

SEQ ID NO: 1126 - DNA, 146 bp, Artificial Sequence
  Bisulfite Padlock Probe
  misc_feature 92, 93, 94, 95, 96, 97: n = A,T,C or G
gactggaagagcactgttaaacgcaaaatccgaaacctcgaccgttggaggctcatcgttcctattcaggcagatgttatcgaggtccgacnnnnnnactaacgcgccaaaaactccaacaaacaagatcggatacgcatgaggct

SEQ ID NO: 1127 - DNA, 146 bp, Artificial Sequence
  Bisulfite Padlock Probe
  misc_feature 95, 96, 97, 98, 99, 100: n = A,T,C or G
gactggaagagcactgttaaacgcaaacaacatcaactccaacatcgttggaggctcatcgttcctattcaggcagatgttatcgaggtccgacnnnnnncctacctaaaacctactacctataccgatcggatacgcatgaggct

SEQ ID NO: 1128 - DNA, 146 bp, Artificial Sequence
  Bisulfite Padlock Probe
  misc_feature 92, 93, 94, 95, 96, 97: n = A,T,C or G
gactggaagagcactgttaaacgcaaccactatacctccataagttggaggctcatcgttcctattcaggcagatgttatcgaggtccgacnnnnnnaaaaccaaacgaaaccaaaaccctaaaccgatcggatacgcatgaggct

SEQ ID NO: 1129 - DNA, 146 bp, Artificial Sequence
  Bisulfite Padlock Probe
  misc_feature 95, 96, 97, 98, 99, 100: n = A,T,C or G
gactggaagagcactgttaaacgcacaactctataaatacaactacgttggaggctcatcgttcctattcaggcagatgttatcgaggtccgacnnnnnncctaattaactaaccactccaaacccgatcggatacgcatgaggct

SEQ ID NO: 1130 - DNA, 146 bp, Artificial Sequence
  Bisulfite Padlock Probe
  misc_feature 93, 94, 95, 96, 97, 98: n = A,T,C or G
gactggaagagcactgttaaacgcacccctaatttataaacaacgttggaggctcatcgttcctattcaggcagatgttatcgaggtccgacnnnnnnaaataaaaatacgccccgcaacctcctagatcggatacgcatgaggct

SEQ ID NO: 1131 - DNA, 146 bp, Artificial Sequence
  Bisulfite Padlock Probe
  misc_feature 95, 96, 97, 98, 99, 100: n = A,T,C or G
gactggaagagcactgttaaacgcacgactctataaatacaactacgttggaggctcatcgttcctattcaggcagatgttatcgaggtccgacnnnnnncctaattaactaaccactccaaacccgatcggatacgcatgaggct

SEQ ID NO: 1132 - DNA, 146 bp, Artificial Sequence
  Bisulfite Padlock Probe
  misc_feature 92, 93, 94, 95, 96, 97: n = A,T,C or G
gactggaagagcactgttaaacgcattcactccccctaaccccgttggaggctcatcgttcctattcaggcagatgttatcgaggtccgacnnnnnnccccattcaaacgaacctacatacaaaaagatcggatacgcatgaggct

SEQ ID NO: 1133 - DNA, 146 bp, Artificial Sequence
  Bisulfite Padlock Probe
  misc_feature 94, 95, 96, 97, 98, 99: n = A,T,C or G
gactggaagagcactgttaaacgccaaaccaaaaattcctaaaaagttggaggctcatcgttcctattcaggcagatgttatcgaggtccgacnnnnnnacctccaaacgctatataaacaaacccgatcggatacgcatgaggct

SEQ ID NO: 1134 - DNA, 146 bp, Artificial Sequence
  Bisulfite Padlock Probe
  misc_feature 92, 93, 94, 95, 96, 97: n = A,T,C or G
gactggaagagcactgttaaacgcccaaaataaaacaactaaagttggaggctcatcgttcctattcaggcagatgttatcgaggtccgacnnnnnnaaacataatcccaacctcccgaacatatcgatcggatacgcatgaggct

SEQ ID NO: 1135 - DNA, 146 bp, Artificial Sequence
  Bisulfite Padlock Probe
  misc_feature 94, 95, 96, 97, 98, 99: n = A,T,C or G
gactggaagagcactgttaaacgcccaaactaaaaccacctaaaagttggaggctcatcgttcctattcaggcagatgttatcgaggtccgacnnnnnnctacacctacgtccccgaaccaaaaaagatcggatacgcatgaggct

SEQ ID NO: 1136 - DNA, 146 bp, Artificial Sequence
  Bisulfite Padlock Probe
  misc_feature 94, 95, 96, 97, 98, 99: n = A,T,C or G
gactggaagagcactgttaaacgcccaaactaaaaccgcctaaaagttggaggctcatcgttcctattcaggcagatgttatcgaggtccgacnnnnnnctacacctacgtccccgaaccgaaaaagatcggatacgcatgaggct

SEQ ID NO: 1137 - DNA, 146 bp, Artificial Sequence
  Bisulfite Padlock Probe
  misc_feature 94, 95, 96, 97, 98, 99: n = A,T,C or G
gactggaagagcactgttaaacgcccctaaataacctaaaacaccgttggaggctcatcgttcctattcaggcagatgttatcgaggtccgacnnnnnnaaatcgcgtcttccctccctttcgatcgatcggatacgcatgaggct

SEQ ID NO: 1138 - DNA, 146 bp, Artificial Sequence
  Bisulfite Padlock Probe
  misc_feature 92, 93, 94, 95, 96, 97: n = A,T,C or G
gactggaagagcactgttaaacgccgcacccctaaatcaaaaagttggaggctcatcgttcctattcaggcagatgttatcgaggtccgacnnnnnnattcttcattatttaaacattttcccttcgatcggatacgcatgaggct

SEQ ID NO: 1139 - DNA, 146 bp, Artificial Sequence
  Bisulfite Padlock Probe
  misc_feature 92, 93, 94, 95, 96, 97: n = A,T,C or G
gactggaagagcactgttaaacgccgcgcccctaaatcaaaaagttggaggctcatcgttcctattcaggcagatgttatcgaggtccgacnnnnnnattcttcattatttaaacattttcccttcgatcggatacgcatgaggct

SEQ ID NO: 1140 - DNA, 146 bp, Artificial Sequence
  Bisulfite Padlock Probe
  misc_feature 93, 94, 95, 96, 97, 98: n = A,T,C or G
gactggaagagcactgttaaacgccttctttaattaactctaccgttggaggctcatcgttcctattcaggcagatgttatcgaggtccgacnnnnnnaactttattacgtttatctaaataccccgatcggatacgcatgaggct

SEQ ID NO: 1141 - DNA, 146 bp, Artificial Sequence
  Bisulfite Padlock Probe
  misc_feature 94, 95, 96, 97, 98, 99: n = A,T,C or G
gactggaagagcactgttaaacgcgaaaataaactctctaaaaccgttggaggctcatcgttcctattcaggcagatgttatcgaggtccgacnnnnnntataaaacaacctatactccccatctcgatcggatacgcatgaggct

SEQ ID NO: 1142 - DNA, 146 bp, Artificial Sequence
  Bisulfite Padlock Probe
  misc_feature 92, 93, 94, 95, 96, 97: n = A,T,C or G
gactggaagagcactgttaaacgcgaccactatacctccataagttggaggctcatcgttcctattcaggcagatgttatcgaggtccgacnnnnnnaaaaccaaacgaaaccgaaaccctaaaccgatcggatacgcatgaggct

SEQ ID NO: 1143 - DNA, 146 bp, Artificial Sequence
  Bisulfite Padlock Probe
  misc_feature 96, 97, 98, 99, 100, 101: n = A,T,C or G
gactggaagagcactgttaaacgcgaccgtaacaaactccctaaaacgttggaggctcatcgttcctattcaggcagatgttatcgaggtccgacnnnnnngcacgaaaacccccaactccaaaaagatcggatacgcatgaggct

SEQ ID NO: 1144 - DNA, 146 bp, Artificial Sequence
  Bisulfite Padlock Probe
  misc_feature 96, 97, 98, 99, 100, 101: n = A,T,C or G
gactggaagagcactgttaaacgcgaccgtaacgaactccctaaaacgttggaggctcatcgttcctattcaggcagatgttatcgaggtccgacnnnnnngcacgaaaacccccgactccaaaaagatcggatacgcatgaggct

SEQ ID NO: 1145 - DNA, 146 bp, Artificial Sequence
  Bisulfite Padlock Probe
  misc_feature 92, 93, 94, 95, 96, 97: n = A,T,C or G
gactggaagagcactgttaaacgcgataaaccgaaacccaaacgttggaggctcatcgttcctattcaggcagatgttatcgaggtccgacnnnnnnaacgactaaaacccccaacgataacaaacgatcggatacgcatgaggct

SEQ ID NO: 1146 - DNA, 146 bp, Artificial Sequence
  Bisulfite Padlock Probe
  misc_feature 92, 93, 94, 95, 96, 97: n = A,T,C or G
gactggaagagcactgttaaacgcgataaaccgaaacccgaacgttggaggctcatcgttcctattcaggcagatgttatcgaggtccgacnnnnnnaacgactaaaacccccaacgataacgaacgatcggatacgcatgaggct

SEQ ID NO: 1147 - DNA, 146 bp, Artificial Sequence
  Bisulfite Padlock Probe
  misc_feature 92, 93, 94, 95, 96, 97: n = A,T,C or G
gactggaagagcactgttaaacgcgctcctaacctacaaatacgttggaggctcatcgttcctattcaggcagatgttatcgaggtccgacnnnnnncccctaaatacatattaatacaataaaaagatcggatacgcatgaggct

SEQ ID NO: 1148 - DNA, 146 bp, Artificial Sequence
  Bisulfite Padlock Probe
  misc_feature 92, 93, 94, 95, 96, 97: n = A,T,C or G
gactggaagagcactgttaaacgcgctcctaacctacgaatacgttggaggctcatcgttcctattcaggcagatgttatcgaggtccgacnnnnnncccctaaatacatattaatacgataaaaagatcggatacgcatgaggct

SEQ ID NO: 1149 - DNA, 146 bp, Artificial Sequence
  Bisulfite Padlock Probe
  misc_feature 96, 97, 98, 99, 100, 101: n = A,T,C or G
gactggaagagcactgttaaacgctaaaaaccgaaaccgaaaccaaagttggaggctcatcgttcctattcaggcagatgttatcgaggtccgacnnnnnnaaactcgctcgctacctcaccaatcgatcggatacgcatgaggct

SEQ ID NO: 1150 - DNA, 146 bp, Artificial Sequence
  Bisulfite Padlock Probe
  misc_feature 96, 97, 98, 99, 100, 101: n = A,T,C or G
gactggaagagcactgttaaacgctaaaaaccgaaaccgaaaccgaagttggaggctcatcgttcctattcaggcagatgttatcgaggtccgacnnnnnnaaactcgctcgctacctcaccgatcgatcggatacgcatgaggct

SEQ ID NO: 1151 - DNA, 146 bp, Artificial Sequence
  Bisulfite Padlock Probe
  misc_feature 93, 94, 95, 96, 97, 98: n = A,T,C or G
gactggaagagcactgttaaacgctaaaactcctcaactataacgttggaggctcatcgttcctattcaggcagatgttatcgaggtccgacnnnnnncccacgaaacccaactaccaaatccaaagatcggatacgcatgaggct

SEQ ID NO: 1152 - DNA, 146 bp, Artificial Sequence
  Bisulfite Padlock Probe
  misc_feature 93, 94, 95, 96, 97, 98: n = A,T,C or G
gactggaagagcactgttaaacgctaaaactcctcgactataacgttggaggctcatcgttcctattcaggcagatgttatcgaggtccgacnnnnnncccacgaaacccgactaccaaatccaaagatcggatacgcatgaggct

SEQ ID NO: 1153 - DNA, 146 bp, Artificial Sequence
  Bisulfite Padlock Probe
  misc_feature 94, 95, 96, 97, 98, 99: n = A,T,C or G
gactggaagagcactgttaaacgctaccccgaaacgtcaaatatcgttggaggctcatcgttcctattcaggcagatgttatcgaggtccgacnnnnnnaaccgaaaataaaatcacaaattaaaagatcggatacgcatgaggct

SEQ ID NO: 1154 - DNA, 146 bp, Artificial Sequence
  Bisulfite Padlock Probe
  misc_feature 94, 95, 96, 97, 98, 99: n = A,T,C or G
gactggaagagcactgttaaacgctaccccgaaacgtcgaatatcgttggaggctcatcgttcctattcaggcagatgttatcgaggtccgacnnnnnnaaccgaaaataaaatcacgaattaaaagatcggatacgcatgaggct

SEQ ID NO: 1155 - DNA, 146 bp, Artificial Sequence
  Bisulfite Padlock Probe
  misc_feature 95, 96, 97, 98, 99, 100: n = A,T,C or G
gactggaagagcactgttaaacgtaaaacccgctcccaaaacaaaagttggaggctcatcgttcctattcaggcagatgttatcgaggtccgacnnnnnntcaaacaaaacccgaaacgcaactccgatcggatacgcatgaggct

SEQ ID NO: 1156 - DNA, 146 bp, Artificial Sequence
  Bisulfite Padlock Probe
  misc_feature 95, 96, 97, 98, 99, 100: n = A,T,C or G
gactggaagagcactgttaaacgtaaaacccgctcccaaaacgaaagttggaggctcatcgttcctattcaggcagatgttatcgaggtccgacnnnnnntcaaacaaaacccgaaacgcgactccgatcggatacgcatgaggct

SEQ ID NO: 1157 - DNA, 146 bp, Artificial Sequence
  Bisulfite Padlock Probe
  misc_feature 92, 93, 94, 95, 96, 97: n = A,T,C or G
gactggaagagcactgttaaacgtaaacaaaactactacaaacgttggaggctcatcgttcctattcaggcagatgttatcgaggtccgacnnnnnnaataacccaaaaactctacaactctaaccgatcggatacgcatgaggct

SEQ ID NO: 1158 - DNA, 146 bp, Artificial Sequence
  Bisulfite Padlock Probe
  misc_feature 92, 93, 94, 95, 96, 97: n = A,T,C or G
gactggaagagcactgttaaacgtaaacgaaactactacaaacgttggaggctcatcgttcctattcaggcagatgttatcgaggtccgacnnnnnnaataacccaaaaactctacgactctaaccgatcggatacgcatgaggct

SEQ ID NO: 1159 - DNA, 146 bp, Artificial Sequence
  Bisulfite Padlock Probe
  misc_feature 92, 93, 94, 95, 96, 97: n = A,T,C or G
gactggaagagcactgttaaacgtatactcgaacgacccaaaagttggaggctcatcgttcctattcaggcagatgttatcgaggtccgacnnnnnnccgaccctaaacataaaacaaaactaaccgatcggatacgcatgaggct

SEQ ID NO: 1160 - DNA, 146 bp, Artificial Sequence
  Bisulfite Padlock Probe
  misc_feature 92, 93, 94, 95, 96, 97: n = A,T,C or G
gactggaagagcactgttaaacgtatactcgaacgacccgaaagttggaggctcatcgttcctattcaggcagatgttatcgaggtccgacnnnnnnccgaccctaaacataaaacgaaactaaccgatcggatacgcatgaggct

SEQ ID NO: 1161 - DNA, 146 bp, Artificial Sequence
  Bisulfite Padlock Probe
  misc_feature 93, 94, 95, 96, 97, 98: n = A,T,C or G
gactggaagagcactgttaaactaaaaatactcaccccaaaaccgttggaggctcatcgttcctattcaggcagatgttatcgaggtccgacnnnnnnaaaaacaaaataaaccgaatacacccccgatcggatacgcatgaggct

SEQ ID NO: 1162 - DNA, 146 bp, Artificial Sequence
  Bisulfite Padlock Probe
  misc_feature 93, 94, 95, 96, 97, 98: n = A,T,C or G
gactggaagagcactgttaaactaaaaatactcaccccgaaaccgttggaggctcatcgttcctattcaggcagatgttatcgaggtccgacnnnnnnaaaaacaaaataaaccgaatacgcccccgatcggatacgcatgaggct

SEQ ID NO: 1163 - DNA, 146 bp, Artificial Sequence
  Bisulfite Padlock Probe
  misc_feature 94, 95, 96, 97, 98, 99: n = A,T,C or G
gactggaagagcactgttaaactaaaaatctacgccctacgcaccgttggaggctcatcgttcctattcaggcagatgttatcgaggtccgacnnnnnnaaaaactaaacaaaactctcctaaaacgatcggatacgcatgaggct

SEQ ID NO: 1164 - DNA, 146 bp, Artificial Sequence
  Bisulfite Padlock Probe
  misc_feature 94, 95, 96, 97, 98, 99: n = A,T,C or G
gactggaagagcactgttaaactaaaaatctacgccctacgcgccgttggaggctcatcgttcctattcaggcagatgttatcgaggtccgacnnnnnnaaaaactaaacaaaactctcctaaaacgatcggatacgcatgaggct

SEQ ID NO: 1165 - DNA, 146 bp, Artificial Sequence
  Bisulfite Padlock Probe
  misc_feature 94, 95, 96, 97, 98, 99: n = A,T,C or G
gactggaagagcactgttaaactaaaaccactaacactttattccgttggaggctcatcgttcctattcaggcagatgttatcgaggtccgacnnnnnntaacctcccaaatcaactaaaaacaccgatcggatacgcatgaggct

SEQ ID NO: 1166 - DNA, 146 bp, Artificial Sequence
  Bisulfite Padlock Probe
  misc_feature 95, 96, 97, 98, 99, 100: n = A,T,C or G
gactggaagagcactgttaaactaaaacccactctaatacaaaaacgttggaggctcatcgttcctattcaggcagatgttatcgaggtccgacnnnnnncgaccgaccactatctacaacccttcgatcggatacgcatgaggct

SEQ ID NO: 1167 - DNA, 146 bp, Artificial Sequence
  Bisulfite Padlock Probe
  misc_feature 95, 96, 97, 98, 99, 100: n = A,T,C or G
gactggaagagcactgttaaactaaaacccactctaatacaaaaacgttggaggctcatcgttcctattcaggcagatgttatcgaggtccgacnnnnnncgaccgaccgctatctacaacccttcgatcggatacgcatgaggct

SEQ ID NO: 1168 - DNA, 146 bp, Artificial Sequence
  Bisulfite Padlock Probe
  misc_feature 94, 95, 96, 97, 98, 99: n = A,T,C or G
gactggaagagcactgttaaactaaaaccccgacgactaacccacgttggaggctcatcgttcctattcaggcagatgttatcgaggtccgacnnnnnnaaacccacccgaaataaaacacccaacgatcggatacgcatgaggct

SEQ ID NO: 1169 - DNA, 146 bp, Artificial Sequence
  Bisulfite Padlock Probe
  misc_feature 94, 95, 96, 97, 98, 99: n = A,T,C or G
gactggaagagcactgttaaactaaaaccccgacgactaacccgcgttggaggctcatcgttcctattcaggcagatgttatcgaggtccgacnnnnnnaaacccacccgaaataaaacgcccaacgatcggatacgcatgaggct

SEQ ID NO: 1170 - DNA, 146 bp, Artificial Sequence
  Bisulfite Padlock Probe
  misc_feature 94, 95, 96, 97, 98, 99: n = A,T,C or G
gactggaagagcactgttaaactaaaaccgctaacactttattccgttggaggctcatcgttcctattcaggcagatgttatcgaggtccgacnnnnnntaacctcccgaatcaactaaaaacaccgatcggatacgcatgaggct

SEQ ID NO: 1171 - DNA, 146 bp, Artificial Sequence
  Bisulfite Padlock Probe
  misc_feature 96, 97, 98, 99, 100, 101: n = A,T,C or G
gactggaagagcactgttaaactaaaacgcataaccaaaacaaatacgttggaggctcatcgttcctattcaggcagatgttatcgaggtccgacnnnnnnactctcacctaaaaccacacctaaagatcggatacgcatgaggct

SEQ ID NO: 1172 - DNA, 146 bp, Artificial Sequence
  Bisulfite Padlock Probe
  misc_feature 96, 97, 98, 99, 100, 101: n = A,T,C or G
gactggaagagcactgttaaactaaaacgcgtaaccaaaacaaatacgttggaggctcatcgttcctattcaggcagatgttatcgaggtccgacnnnnnnactctcacctaaaaccgcacctaaagatcggatacgcatgaggct

SEQ ID NO: 1173 - DNA, 146 bp, Artificial Sequence
  Bisulfite Padlock Probe
  misc_feature 92, 93, 94, 95, 96, 97: n = A,T,C or G
gactggaagagcactgttaaactaaacaattcaatacatccccgttggaggctcatcgttcctattcaggcagatgttatcgaggtccgacnnnnnnctaaatatttaaatctcctcctacaactagatcggatacgcatgaggct

SEQ ID NO: 1174 - DNA, 146 bp, Artificial Sequence
  Bisulfite Padlock Probe
  misc_feature 94, 95, 96, 97, 98, 99: n = A,T,C or G
gactggaagagcactgttaaactaaaccaaaaaacctcccaaatagttggaggctcatcgttcctattcaggcagatgttatcgaggtccgacnnnnnnaaaactctacaattctaactaacccacgatcggatacgcatgaggct

SEQ ID NO: 1175 - DNA, 146 bp, Artificial Sequence
  Bisulfite Padlock Probe
  misc_feature 94, 95, 96, 97, 98, 99: n = A,T,C or G
gactggaagagcactgttaaactaaaccgaaaaacctcccaaatagttggaggctcatcgttcctattcaggcagatgttatcgaggtccgacnnnnnnaaaactctacgattctaactaacccacgatcggatacgcatgaggct

SEQ ID NO: 1176 - DNA, 146 bp, Artificial Sequence
  Bisulfite Padlock Probe
  misc_feature 96, 97, 98, 99, 100, 101: n = A,T,C or G
gactggaagagcactgttaaactaaaccttcctacccgaaaacccacgttggaggctcatcgttcctattcaggcagatgttatcgaggtccgacnnnnnntccgacctattctccaaacgtcgcagatcggatacgcatgaggct

SEQ ID NO: 1177 - DNA, 146 bp, Artificial Sequence
  Bisulfite Padlock Probe
  misc_feature 96, 97, 98, 99, 100, 101: n = A,T,C or G
gactggaagagcactgttaaactaaaccttcctacccgaaaacccgcgttggaggctcatcgttcctattcaggcagatgttatcgaggtccgacnnnnnntccgacctattctccaaacgtcgcggatcggatacgcatgaggct

SEQ ID NO: 1178 - DNA, 146 bp, Artificial Sequence
  Bisulfite Padlock Probe
  misc_feature 96, 97, 98, 99, 100, 101: n = A,T,C or G
gactggaagagcactgttaaactaaactcgaaacccaaaccaatcccgttggaggctcatcgttcctattcaggcagatgttatcgaggtccgacnnnnnnaaaaactaaaacgcaaccccctcccgatcggatacgcatgaggct

SEQ ID NO: 1179 - DNA, 146 bp, Artificial Sequence
  Bisulfite Padlock Probe
  misc_feature 96, 97, 98, 99, 100, 101: n = A,T,C or G
gactggaagagcactgttaaactaaactcgaaacccaaaccgatcccgttggaggctcatcgttcctattcaggcagatgttatcgaggtccgacnnnnnnaaaaactaaaacgcgaccccctcccgatcggatacgcatgaggct

SEQ ID NO: 1180 - DNA, 146 bp, Artificial Sequence
  Bisulfite Padlock Probe
  misc_feature 96, 97, 98, 99, 100, 101: n = A,T,C or G
gactggaagagcactgttaaactaacaaacgtcgaaacgatcaaaccgttggaggctcatcgttcctattcaggcagatgttatcgaggtccgacnnnnnncctaaactccccctcctaacccccagatcggatacgcatgaggct

SEQ ID NO: 1181 - DNA, 146 bp, Artificial Sequence
  Bisulfite Padlock Probe
  misc_feature 96, 97, 98, 99, 100, 101: n = A,T,C or G
gactggaagagcactgttaaactaacaaacgtcgaaacgatcgaaccgttggaggctcatcgttcctattcaggcagatgttatcgaggtccgacnnnnnncctaaactccccctcctaacccccagatcggatacgcatgaggct

SEQ ID NO: 1182 - DNA, 146 bp, Artificial Sequence
  Bisulfite Padlock Probe
  misc_feature 95, 96, 97, 98, 99, 100: n = A,T,C or G
gactggaagagcactgttaaactaaccacttccaaaaacctaaaaagttggaggctcatcgttcctattcaggcagatgttatcgaggtccgacnnnnnnaaaactctctactaacatctcctaccgatcggatacgcatgaggct

SEQ ID NO: 1183 - DNA, 146 bp, Artificial Sequence
  Bisulfite Padlock Probe
  misc_feature 95, 96, 97, 98, 99, 100: n = A,T,C or G
gactggaagagcactgttaaactaacccttctattttattaaactcgttggaggctcatcgttcctattcaggcagatgttatcgaggtccgacnnnnnnacaacctacactcaacacttcctaacgatcggatacgcatgaggct

SEQ ID NO: 1184 - DNA, 146 bp, Artificial Sequence
  Bisulfite Padlock Probe
  misc_feature 95, 96, 97, 98, 99, 100: n = A,T,C or G
gactggaagagcactgttaaactaacccttctattttattaaactcgttggaggctcatcgttcctattcaggcagatgttatcgaggtccgacnnnnnnacaacctacactcaacgcttcctaacgatcggatacgcatgaggct

SEQ ID NO: 1185 - DNA, 146 bp, Artificial Sequence
  Bisulfite Padlock Probe
  misc_feature 95, 96, 97, 98, 99, 100: n = A,T,C or G
gactggaagagcactgttaaactaaccgcttccaaaaacctaaaaagttggaggctcatcgttcctattcaggcagatgttatcgaggtccgacnnnnnnaaaactctctactaacgtctcctaccgatcggatacgcatgaggct

SEQ ID NO: 1186 - DNA, 146 bp, Artificial Sequence
  Bisulfite Padlock Probe
  misc_feature 92, 93, 94, 95, 96, 97: n = A,T,C or G
gactggaagagcactgttaaactaactaaacccactctaaaaagttggaggctcatcgttcctattcaggcagatgttatcgaggtccgacnnnnnnacctcctccataaaaccttcctaactaccgatcggatacgcatgaggct

SEQ ID NO: 1187 - DNA, 146 bp, Artificial Sequence
  Bisulfite Padlock Probe
  misc_feature 92, 93, 94, 95, 96, 97: n = A,T,C or G
gactggaagagcactgttaaactaactaaacccgctctaaaaagttggaggctcatcgttcctattcaggcagatgttatcgaggtccgacnnnnnnacctcctccataaaaccttcctaactaccgatcggatacgcatgaggct

SEQ ID NO: 1188 - DNA, 146 bp, Artificial Sequence
  Bisulfite Padlock Probe
  misc_feature 92, 93, 94, 95, 96, 97: n = A,T,C or G
gactggaagagcactgttaaactaataaacgcataactaaaaagttggaggctcatcgttcctattcaggcagatgttatcgaggtccgacnnnnnnaaaacctaaaaacccaacaaaaccaaaccgatcggatacgcatgaggct

SEQ ID NO: 1189 - DNA, 146 bp, Artificial Sequence
  Bisulfite Padlock Probe
  misc_feature 92, 93, 94, 95, 96, 97: n = A,T,C or G
gactggaagagcactgttaaactaataaacgcgtaactaaaaagttggaggctcatcgttcctattcaggcagatgttatcgaggtccgacnnnnnnaaaacctaaaaacccaacgaaaccaaaccgatcggatacgcatgaggct

SEQ ID NO: 1190 - DNA, 146 bp, Artificial Sequence
  Bisulfite Padlock Probe
  misc_feature 93, 94, 95, 96, 97, 98: n = A,T,C or G
gactggaagagcactgttaaactaccataataataaaataaaacgttggaggctcatcgttcctattcaggcagatgttatcgaggtccgacnnnnnnatcccgctacaaactctacaaacacaacgatcggatacgcatgaggct

SEQ ID NO: 1191 - DNA, 146 bp, Artificial Sequence
  Bisulfite Padlock Probe
  misc_feature 93, 94, 95, 96, 97, 98: n = A,T,C or G
gactggaagagcactgttaaactaccataataataaaataaaacgttggaggctcatcgttcctattcaggcagatgttatcgaggtccgacnnnnnnatcccgctacaaactctacaaacgcaacgatcggatacgcatgaggct

SEQ ID NO: 1192 - DNA, 146 bp, Artificial Sequence
  Bisulfite Padlock Probe
  misc_feature 92, 93, 94, 95, 96, 97: n = A,T,C or G
gactggaagagcactgttaaactaccccaaacacaaaccaaaagttggaggctcatcgttcctattcaggcagatgttatcgaggtccgacnnnnnnaaaaataacataaacacctaaaacataaagatcggatacgcatgaggct

SEQ ID NO: 1193 - DNA, 146 bp, Artificial Sequence
  Bisulfite Padlock Probe
  misc_feature 96, 97, 98, 99, 100, 101: n = A,T,C or G
gactggaagagcactgttaaactaccgaaactactaccaaaaactacgttggaggctcatcgttcctattcaggcagatgttatcgaggtccgacnnnnnncaacaacaacacgccacccaattacgatcggatacgcatgaggct

SEQ ID NO: 1194 - DNA, 146 bp, Artificial Sequence
  Bisulfite Padlock Probe
  misc_feature 96, 97, 98, 99, 100, 101: n = A,T,C or G
gactggaagagcactgttaaactaccgaaactactaccgaaaactacgttggaggctcatcgttcctattcaggcagatgttatcgaggtccgacnnnnnncaacaacaacacgccgcccaattacgatcggatacgcatgaggct

SEQ ID NO: 1195 - DNA, 146 bp, Artificial Sequence
  Bisulfite Padlock Probe
  misc_feature 96, 97, 98, 99, 100, 101: n = A,T,C or G
gactggaagagcactgttaaactacgcacactaaatccccaaaaaccgttggaggctcatcgttcctattcaggcagatgttatcgaggtccgacnnnnnnaaccctacgtctcaactacccaaacgatcggatacgcatgaggct

SEQ ID NO: 1196 - DNA, 146 bp, Artificial Sequence
  Bisulfite Padlock Probe
  misc_feature 96, 97, 98, 99, 100, 101: n = A,T,C or G
gactggaagagcactgttaaactacgcgcactaaatccccaaaaaccgttggaggctcatcgttcctattcaggcagatgttatcgaggtccgacnnnnnnaaccctacgtctcaactacccgaacgatcggatacgcatgaggct

SEQ ID NO: 1197 - DNA, 146 bp, Artificial Sequence
  Bisulfite Padlock Probe
  misc_feature 93, 94, 95, 96, 97, 98: n = A,T,C or G
gactggaagagcactgttaaactactacctcctttcccaaatccgttggaggctcatcgttcctattcaggcagatgttatcgaggtccgacnnnnnncccccatcccaaatcaaaaaccaaaaccgatcggatacgcatgaggct

SEQ ID NO: 1198 - DNA, 146 bp, Artificial Sequence
  Bisulfite Padlock Probe
  misc_feature 93, 94, 95, 96, 97, 98: n = A,T,C or G
gactggaagagcactgttaaactactacctcctttcccaaatccgttggaggctcatcgttcctattcaggcagatgttatcgaggtccgacnnnnnncccccatcccaaatcaaaaaccgaaaccgatcggatacgcatgaggct

SEQ ID NO: 1199 - DNA, 146 bp, Artificial Sequence
  Bisulfite Padlock Probe
  misc_feature 95, 96, 97, 98, 99, 100: n = A,T,C or G
gactggaagagcactgttaaactataaaatcccatcccaacaaaaagttggaggctcatcgttcctattcaggcagatgttatcgaggtccgacnnnnnnaccttcaaaccaaaacacccttcaaagatcggatacgcatgaggct

SEQ ID NO: 1200 - DNA, 146 bp, Artificial Sequence
  Bisulfite Padlock Probe
  misc_feature 95, 96, 97, 98, 99, 100: n = A,T,C or G
gactggaagagcactgttaaactataaaatcccgtcccaacaaaaagttggaggctcatcgttcctattcaggcagatgttatcgaggtccgacnnnnnnaccttcgaaccaaaacacccttcaaagatcggatacgcatgaggct

SEQ ID NO: 1201 - DNA, 146 bp, Artificial Sequence
  Bisulfite Padlock Probe
  misc_feature 93, 94, 95, 96, 97, 98: n = A,T,C or G
gactggaagagcactgttaaactataacaaaaccttcaaccaaagttggaggctcatcgttcctattcaggcagatgttatcgaggtccgacnnnnnnaaaacacacaacaacctaaaacccttccgatcggatacgcatgaggct

SEQ ID NO: 1202 - DNA, 146 bp, Artificial Sequence
  Bisulfite Padlock Probe
  misc_feature 93, 94, 95, 96, 97, 98: n = A,T,C or G
gactggaagagcactgttaaactataacaaaaccttcaaccaaagttggaggctcatcgttcctattcaggcagatgttatcgaggtccgacnnnnnnaaaacacacaacgacctaaaacccttccgatcggatacgcatgaggct

SEQ ID NO: 1203 - DNA, 146 bp, Artificial Sequence
  Bisulfite Padlock Probe
  misc_feature 93, 94, 95, 96, 97, 98: n = A,T,C or G
gactggaagagcactgttaaactatataacattccacccccaccgttggaggctcatcgttcctattcaggcagatgttatcgaggtccgacnnnnnnaataatcttaaactccccaacctcaatcgatcggatacgcatgaggct

SEQ ID NO: 1204 - DNA, 146 bp, Artificial Sequence
  Bisulfite Padlock Probe
  misc_feature 95, 96, 97, 98, 99, 100: n = A,T,C or G
gactggaagagcactgttaaactatcaaacgctacgcgtcactaccgttggaggctcatcgttcctattcaggcagatgttatcgaggtccgacnnnnnngaaaaactccgaacgacaccccaacagatcggatacgcatgaggct

SEQ ID NO: 1205 - DNA, 146 bp, Artificial Sequence
  Bisulfite Padlock Probe
  misc_feature 95, 96, 97, 98, 99, 100: n = A,T,C or G
gactggaagagcactgttaaactatcaaacgctacgcgtcgctaccgttggaggctcatcgttcctattcaggcagatgttatcgaggtccgacnnnnnngaaaaactccgaacgacaccccgacagatcggatacgcatgaggct

SEQ ID NO: 1206 - DNA, 146 bp, Artificial Sequence
  Bisulfite Padlock Probe
  misc_feature 92, 93, 94, 95, 96, 97: n = A,T,C or G
gactggaagagcactgttaaactatcccaacctttcttttctcgttggaggctcatcgttcctattcaggcagatgttatcgaggtccgacnnnnnnaaaaacgatctccgaaacacactccaatcgatcggatacgcatgaggct

SEQ ID NO: 1207 - DNA, 146 bp, Artificial Sequence
  Bisulfite Padlock Probe
  misc_feature 92, 93, 94, 95, 96, 97: n = A,T,C or G
gactggaagagcactgttaaactatcccgacctttcttttctcgttggaggctcatcgttcctattcaggcagatgttatcgaggtccgacnnnnnnaaaaacgatctccgaaacacgctccaatcgatcggatacgcatgaggct

SEQ ID NO: 1208 - DNA, 146 bp, Artificial Sequence
  Bisulfite Padlock Probe
  misc_feature 95, 96, 97, 98, 99, 100: n = A,T,C or G
gactggaagagcactgttaaactcaaaactcaaaattaatcaaaaagttggaggctcatcgttcctattcaggcagatgttatcgaggtccgacnnnnnnaaacgctacttcgataaccacccctcgatcggatacgcatgaggct

SEQ ID NO: 1209 - DNA, 146 bp, Artificial Sequence
  Bisulfite Padlock Probe
  misc_feature 95, 96, 97, 98, 99, 100: n = A,T,C or G
gactggaagagcactgttaaactcaaaactcaaaattaatcaaaaagttggaggctcatcgttcctattcaggcagatgttatcgaggtccgacnnnnnnaaacgctacttcgataaccgcccctcgatcggatacgcatgaggct

SEQ ID NO: 1210 - DNA, 146 bp, Artificial Sequence
  Bisulfite Padlock Probe
  misc_feature 92, 93, 94, 95, 96, 97: n = A,T,C or G
gactggaagagcactgttaaactcaaacccaaaatactaactcgttggaggctcatcgttcctattcaggcagatgttatcgaggtccgacnnnnnnaaaaatccctccacaaccttatttttctagatcggatacgcatgaggct

SEQ ID NO: 1211 - DNA, 146 bp, Artificial Sequence
  Bisulfite Padlock Probe
  misc_feature 93, 94, 95, 96, 97, 98: n = A,T,C or G
gactggaagagcactgttaaactcaataaaaccgacaaaaaaccgttggaggctcatcgttcctattcaggcagatgttatcgaggtccgacnnnnnntccctatccccaatacacacaaataacagatcggatacgcatgaggct

SEQ ID NO: 1212 - DNA, 146 bp, Artificial Sequence
  Bisulfite Padlock Probe
  misc_feature 93, 94, 95, 96, 97, 98: n = A,T,C or G
gactggaagagcactgttaaactcaataaaaccgacgaaaaaccgttggaggctcatcgttcctattcaggcagatgttatcgaggtccgacnnnnnntccctatccccgatacacacaaataacagatcggatacgcatgaggct

SEQ ID NO: 1213 - DNA, 146 bp, Artificial Sequence
  Bisulfite Padlock Probe
  misc_feature 92, 93, 94, 95, 96, 97: n = A,T,C or G
gactggaagagcactgttaaactcacctaaaataacctcctaagttggaggctcatcgttcctattcaggcagatgttatcgaggtccgacnnnnnnctctacaacccaaaaataaaattaaataagatcggatacgcatgaggct

SEQ ID NO: 1214 - DNA, 146 bp, Artificial Sequence
  Bisulfite Padlock Probe
  misc_feature 93, 94, 95, 96, 97, 98: n = A,T,C or G
gactggaagagcactgttaaactcactaacgccaaaccaaactcgttggaggctcatcgttcctattcaggcagatgttatcgaggtccgacnnnnnnactaaaaacatccctaactttctaaaaagatcggatacgcatgaggct

SEQ ID NO: 1215 - DNA, 146 bp, Artificial Sequence
  Bisulfite Padlock Probe
  misc_feature 93, 94, 95, 96, 97, 98: n = A,T,C or G
gactggaagagcactgttaaactcactaacgccgaaccaaactcgttggaggctcatcgttcctattcaggcagatgttatcgaggtccgacnnnnnnactaaaaacgtccctaactttctaaaaagatcggatacgcatgaggct

SEQ ID NO: 1216 - DNA, 146 bp, Artificial Sequence
  Bisulfite Padlock Probe
  misc_feature 94, 95, 96, 97, 98, 99: n = A,T,C or G
gactggaagagcactgttaaactcataaccgatcaacaccaaaaagttggaggctcatcgttcctattcaggcagatgttatcgaggtccgacnnnnnnccccgaataaaccccaccacacatatagatcggatacgcatgaggct

SEQ ID NO: 1217 - DNA, 146 bp, Artificial Sequence
  Bisulfite Padlock Probe
  misc_feature 94, 95, 96, 97, 98, 99: n = A,T,C or G
gactggaagagcactgttaaactcataaccgatcaacgccaaaaagttggaggctcatcgttcctattcaggcagatgttatcgaggtccgacnnnnnnccccgaataaaccccgccacacatatagatcggatacgcatgaggct

SEQ ID NO: 1218 - DNA, 146 bp, Artificial Sequence
  Bisulfite Padlock Probe
  misc_feature 92, 93, 94, 95, 96, 97: n = A,T,C or G
gactggaagagcactgttaaactccaaaaacaaaaccaaaaacgttggaggctcatcgttcctattcaggcagatgttatcgaggtccgacnnnnnnaaaaataaaatacaactaaaacccaaccagatcggatacgcatgaggct

SEQ ID NO: 1219 - DNA, 146 bp, Artificial Sequence
  Bisulfite Padlock Probe
  misc_feature 95, 96, 97, 98, 99, 100: n = A,T,C or G
gactggaagagcactgttaaactcccaaaaccgaaaacccaaacttgttggaggctcatcgttcctattcaggcagatgttatcgaggtccgacnnnnnncacccaaaaccccctaactctaaaaagatcggatacgcatgaggct

SEQ ID NO: 1220 - DNA, 146 bp, Artificial Sequence
  Bisulfite Padlock Probe
  misc_feature 95, 96, 97, 98, 99, 100: n = A,T,C or G
gactggaagagcactgttaaactcccaaaaccgaaaacccgaacttgttggaggctcatcgttcctattcaggcagatgttatcgaggtccgacnnnnnncacccgaaaccccctaactctaaaaagatcggatacgcatgaggct

SEQ ID NO: 1221 - DNA, 146 bp, Artificial Sequence
  Bisulfite Padlock Probe
  misc_feature 94, 95, 96, 97, 98, 99: n = A,T,C or G
gactggaagagcactgttaaactccccaacaaaccaaaataaaaagttggaggctcatcgttcctattcaggcagatgttatcgaggtccgacnnnnnnaaacgcaaaaactaaaaccatacaaaagatcggatacgcatgaggct

SEQ ID NO: 1222 - DNA, 146 bp, Artificial Sequence
  Bisulfite Padlock Probe
  misc_feature 94, 95, 96, 97, 98, 99: n = A,T,C or G
gactggaagagcactgttaaactccccaacaaaccaaaataaaaagttggaggctcatcgttcctattcaggcagatgttatcgaggtccgacnnnnnnaaacgcaaaaactaaaaccgtacaaaagatcggatacgcatgaggct

SEQ ID NO: 1223 - DNA, 146 bp, Artificial Sequence
  Bisulfite Padlock Probe
  misc_feature 93, 94, 95, 96, 97, 98: n = A,T,C or G
gactggaagagcactgttaaactccccgaaaacaaacaaaaaccgttggaggctcatcgttcctattcaggcagatgttatcgaggtccgacnnnnnncctcaactcaaaaattattttcctccccgatcggatacgcatgaggct

SEQ ID NO: 1224 - DNA, 146 bp, Artificial Sequence
  Bisulfite Padlock Probe
  misc_feature 93, 94, 95, 96, 97, 98: n = A,T,C or G
gactggaagagcactgttaaactccccgaaaacgaacaaaaaccgttggaggctcatcgttcctattcaggcagatgttatcgaggtccgacnnnnnncctcgactcaaaaattattttcctccccgatcggatacgcatgaggct

SEQ ID NO: 1225 - DNA, 146 bp, Artificial Sequence
  Bisulfite Padlock Probe
  misc_feature 92, 93, 94, 95, 96, 97: n = A,T,C or G
gactggaagagcactgttaaactccgaaaacaaaaccaaaaacgttggaggctcatcgttcctattcaggcagatgttatcgaggtccgacnnnnnnaaaaataaaatacgactaaaacccaaccagatcggatacgcatgaggct

SEQ ID NO: 1226 - DNA, 146 bp, Artificial Sequence
  Bisulfite Padlock Probe
  misc_feature 96, 97, 98, 99, 100, 101: n = A,T,C or G
gactggaagagcactgttaaactccgaaatccaaacaccaacaaaccgttggaggctcatcgttcctattcaggcagatgttatcgaggtccgacnnnnnncgaacaaacgacctcccccataaacgatcggatacgcatgaggct

SEQ ID NO: 1227 - DNA, 146 bp, Artificial Sequence
  Bisulfite Padlock Probe
  misc_feature 96, 97, 98, 99, 100, 101: n = A,T,C or G
gactggaagagcactgttaaactccgaaatccgaacaccaacaaaccgttggaggctcatcgttcctattcaggcagatgttatcgaggtccgacnnnnnncgaacaaacgacctcccccgtaaacgatcggatacgcatgaggct

SEQ ID NO: 1228 - DNA, 146 bp, Artificial Sequence
  Bisulfite Padlock Probe
  misc_feature 92, 93, 94, 95, 96, 97: n = A,T,C or G
gactggaagagcactgttaaactccgcaaaactcgacatctacgttggaggctcatcgttcctattcaggcagatgttatcgaggtccgacnnnnnnctttaatctaccaccattacaaccaaactgatcggatacgcatgaggct

SEQ ID NO: 1229 - DNA, 146 bp, Artificial Sequence
  Bisulfite Padlock Probe
  misc_feature 92, 93, 94, 95, 96, 97: n = A,T,C or G
gactggaagagcactgttaaactccgcaaaactcgacgtctacgttggaggctcatcgttcctattcaggcagatgttatcgaggtccgacnnnnnnctttaatctaccaccattacaaccgaactgatcggatacgcatgaggct

SEQ ID NO: 1230 - DNA, 146 bp, Artificial Sequence
  Bisulfite Padlock Probe
  misc_feature 93, 94, 95, 96, 97, 98: n = A,T,C or G
gactggaagagcactgttaaactcctaaaacccaacaaaaacccgttggaggctcatcgttcctattcaggcagatgttatcgaggtccgacnnnnnnctcccccaacctctcccaaattacaaaagatcggatacgcatgaggct

SEQ ID NO: 1231 - DNA, 146 bp, Artificial Sequence
  Bisulfite Padlock Probe
  misc_feature 93, 94, 95, 96, 97, 98: n = A,T,C or G
gactggaagagcactgttaaactcctaaaacccaacgaaaacccgttggaggctcatcgttcctattcaggcagatgttatcgaggtccgacnnnnnnctcccccgacctctcccaaattacaaaagatcggatacgcatgaggct

SEQ ID NO: 1232 - DNA, 146 bp, Artificial Sequence
  Bisulfite Padlock Probe
  misc_feature 93, 94, 95, 96, 97, 98: n = A,T,C or G
gactggaagagcactgttaaactcgaaacacacaaaatatccccgttggaggctcatcgttcctattcaggcagatgttatcgaggtccgacnnnnnnaaaaaccgaaaaccaacaacctcttaaagatcggatacgcatgaggct

SEQ ID NO: 1233 - DNA, 146 bp, Artificial Sequence
  Bisulfite Padlock Probe
  misc_feature 94, 95, 96, 97, 98, 99: n = A,T,C or G
gactggaagagcactgttaaactcgaaaccgcaattcctctaaccgttggaggctcatcgttcctattcaggcagatgttatcgaggtccgacnnnnnnaaaaacaacccaacttcccaatacccagatcggatacgcatgaggct

SEQ ID NO: 1234 - DNA, 146 bp, Artificial Sequence
  Bisulfite Padlock Probe
  misc_feature 94, 95, 96, 97, 98, 99: n = A,T,C or G
gactggaagagcactgttaaactcgaaaccgcgattcctctaaccgttggaggctcatcgttcctattcaggcagatgttatcgaggtccgacnnnnnnaaaaacaacccaacttcccaatacccggatcggatacgcatgaggct

SEQ ID NO: 1235 - DNA, 146 bp, Artificial Sequence
  Bisulfite Padlock Probe
  misc_feature 93, 94, 95, 96, 97, 98: n = A,T,C or G
gactggaagagcactgttaaactcgaaacgcacaaaatatccccgttggaggctcatcgttcctattcaggcagatgttatcgaggtccgacnnnnnnaaaaaccgaaaaccgacaacctcttaaagatcggatacgcatgaggct

SEQ ID NO: 1236 - DNA, 146 bp, Artificial Sequence
  Bisulfite Padlock Probe
  misc_feature 92, 93, 94, 95, 96, 97: n = A,T,C or G
gactggaagagcactgttaaactcgacttaaaacgaccaccaagttggaggctcatcgttcctattcaggcagatgttatcgaggtccgacnnnnnnaaaatcccaaaaacctaaaaccaaatcttgatcggatacgcatgaggct

SEQ ID NO: 1237 - DNA, 146 bp, Artificial Sequence
  Bisulfite Padlock Probe
  misc_feature 92, 93, 94, 95, 96, 97: n = A,T,C or G
gactggaagagcactgttaaactcgacttaaaacgaccgccaagttggaggctcatcgttcctattcaggcagatgttatcgaggtccgacnnnnnnaaaatcccaaaaacctaaaaccaaatcttgatcggatacgcatgaggct

SEQ ID NO: 1238 - DNA, 146 bp, Artificial Sequence
  Bisulfite Padlock Probe
  misc_feature 92, 93, 94, 95, 96, 97: n = A,T,C or G
gactggaagagcactgttaaactcgccgaaaactacaccaaccgttggaggctcatcgttcctattcaggcagatgttatcgaggtccgacnnnnnnccgctacacttcctactactcacaaacacgatcggatacgcatgaggct

SEQ ID NO: 1239 - DNA, 146 bp, Artificial Sequence
  Bisulfite Padlock Probe
  misc_feature 92, 93, 94, 95, 96, 97: n = A,T,C or G
gactggaagagcactgttaaactcgccgaaaactacgccaaccgttggaggctcatcgttcctattcaggcagatgttatcgaggtccgacnnnnnnccgctacacttcctactactcacgaacacgatcggatacgcatgaggct

SEQ ID NO: 1240 - DNA, 146 bp, Artificial Sequence
  Bisulfite Padlock Probe
  misc_feature 95, 96, 97, 98, 99, 100: n = A,T,C or G
gactggaagagcactgttaaactcgctctaacccctacaccctaaagttggaggctcatcgttcctattcaggcagatgttatcgaggtccgacnnnnnnaactaaataaataaaaccgaaacaacgatcggatacgcatgaggct

SEQ ID NO: 1241 - DNA, 146 bp, Artificial Sequence
  Bisulfite Padlock Probe
  misc_feature 95, 96, 97, 98, 99, 100: n = A,T,C or G
gactggaagagcactgttaaactcgctctaacccctacgccctaaagttggaggctcatcgttcctattcaggcagatgttatcgaggtccgacnnnnnnaactaaataaataaaaccgaaacgacgatcggatacgcatgaggct

SEQ ID NO: 1242 - DNA, 146 bp, Artificial Sequence
  Bisulfite Padlock Probe
  misc_feature 93, 94, 95, 96, 97, 98: n = A,T,C or G
gactggaagagcactgttaaactctaacttaatacccaactaaagttggaggctcatcgttcctattcaggcagatgttatcgaggtccgacnnnnnnaaaaacgaaaccttcaaccccgcaactagatcggatacgcatgaggct

SEQ ID NO: 1243 - DNA, 146 bp, Artificial Sequence
  Bisulfite Padlock Probe
  misc_feature 93, 94, 95, 96, 97, 98: n = A,T,C or G
gactggaagagcactgttaaactctaacttaatacccaactaaagttggaggctcatcgttcctattcaggcagatgttatcgaggtccgacnnnnnnaaaaacgaaaccttcaaccccgcgactagatcggatacgcatgaggct

SEQ ID NO: 1244 - DNA, 146 bp, Artificial Sequence
  Bisulfite Padlock Probe
  misc_feature 95, 96, 97, 98, 99, 100: n = A,T,C or G
gactggaagagcactgttaaactctacatcataaacgccatctactgttggaggctcatcgttcctattcaggcagatgttatcgaggtccgacnnnnnnacaacgacacaacaaaaaacaacaccgatcggatacgcatgaggct

SEQ ID NO: 1245 - DNA, 146 bp, Artificial Sequence
  Bisulfite Padlock Probe
  misc_feature 95, 96, 97, 98, 99, 100: n = A,T,C or G
gactggaagagcactgttaaactctacatcataaacgccgtctactgttggaggctcatcgttcctattcaggcagatgttatcgaggtccgacnnnnnnacaacgacacaacgaaaaacaacaccgatcggatacgcatgaggct

SEQ ID NO: 1246 - DNA, 146 bp, Artificial Sequence
  Bisulfite Padlock Probe
  misc_feature 96, 97, 98, 99, 100, 101: n = A,T,C or G
gactggaagagcactgttaaacttaaaaactcaaactataaactatcgttggaggctcatcgttcctattcaggcagatgttatcgaggtccgacnnnnnnaaaaactttcttaaaacatccccacgatcggatacgcatgaggct

SEQ ID NO: 1247 - DNA, 146 bp, Artificial Sequence
  Bisulfite Padlock Probe
  misc_feature 96, 97, 98, 99, 100, 101: n = A,T,C or G
gactggaagagcactgttaaacttaaaaactcaaactataaactatcgttggaggctcatcgttcctattcaggcagatgttatcgaggtccgacnnnnnnaaaaactttcttaaaacgtccccacgatcggatacgcatgaggct

SEQ ID NO: 1248 - DNA, 146 bp, Artificial Sequence
  Bisulfite Padlock Probe
  misc_feature 96, 97, 98, 99, 100, 101: n = A,T,C or G
gactggaagagcactgttaaacttaaacataaacacccaaaaaccccgttggaggctcatcgttcctattcaggcagatgttatcgaggtccgacnnnnnnccgaacacaccacaaaaacctacccgatcggatacgcatgaggct

SEQ ID NO: 1249 - DNA, 146 bp, Artificial Sequence
  Bisulfite Padlock Probe
  misc_feature 96, 97, 98, 99, 100, 101: n = A,T,C or G
gactggaagagcactgttaaacttaaacataaacgcccaaaaaccccgttggaggctcatcgttcctattcaggcagatgttatcgaggtccgacnnnnnnccgaacacgccacaaaaacctacccgatcggatacgcatgaggct

SEQ ID NO: 1250 - DNA, 146 bp, Artificial Sequence
  Bisulfite Padlock Probe
  misc_feature 96, 97, 98, 99, 100, 101: n = A,T,C or G
gactggaagagcactgttaaacttaaatataataacctacacaaatagttggaggctcatcgttcctattcaggcagatgttatcgaggtccgacnnnnnnttttcctaaaaccaaaaaatcttccgatcggatacgcatgaggct

SEQ ID NO: 1251 - DNA, 146 bp, Artificial Sequence
  Bisulfite Padlock Probe
  misc_feature 96, 97, 98, 99, 100, 101: n = A,T,C or G
gactggaagagcactgttaaacttaaatataataacctacgcaaatagttggaggctcatcgttcctattcaggcagatgttatcgaggtccgacnnnnnnttttcctaaaaccgaaaaatcttccgatcggatacgcatgaggct

SEQ ID NO: 1252 - DNA, 146 bp, Artificial Sequence
  Bisulfite Padlock Probe
  misc_feature 95, 96, 97, 98, 99, 100: n = A,T,C or G
gactggaagagcactgttaaacttaataaaactttcttcaaaattcgttggaggctcatcgttcctattcaggcagatgttatcgaggtccgacnnnnnnaaacaaaaacccgcaaaacctactaagatcggatacgcatgaggct

SEQ ID NO: 1253 - DNA, 146 bp, Artificial Sequence
  Bisulfite Padlock Probe
  misc_feature 95, 96, 97, 98, 99, 100: n = A,T,C or G
gactggaagagcactgttaaacttaataaaactttcttcgaaattcgttggaggctcatcgttcctattcaggcagatgttatcgaggtccgacnnnnnnaaacaaaaacccgcgaaacctactaagatcggatacgcatgaggct

SEQ ID NO: 1254 - DNA, 146 bp, Artificial Sequence
  Bisulfite Padlock Probe
  misc_feature 93, 94, 95, 96, 97, 98: n = A,T,C or G
gactggaagagcactgttaaacttacaattcccaaatccaaaaagttggaggctcatcgttcctattcaggcagatgttatcgaggtccgacnnnnnncctccctaaaaattatcaaattcaaaaagatcggatacgcatgaggct

SEQ ID NO: 1255 - DNA, 146 bp, Artificial Sequence
  Bisulfite Padlock Probe
  misc_feature 93, 94, 95, 96, 97, 98: n = A,T,C or G
gactggaagagcactgttaaacttacgattcccaaatccaaaaagttggaggctcatcgttcctattcaggcagatgttatcgaggtccgacnnnnnncctccctaaaaattatcaaattcaaaaagatcggatacgcatgaggct

SEQ ID NO: 1256 - DNA, 146 bp, Artificial Sequence
  Bisulfite Padlock Probe
  misc_feature 94, 95, 96, 97, 98, 99: n = A,T,C or G
gactggaagagcactgttaaacttcaaactccaacacactcccacgttggaggctcatcgttcctattcaggcagatgttatcgaggtccgacnnnnnncgcccgtcacccacttacctataaaaagatcggatacgcatgaggct

SEQ ID NO: 1257 - DNA, 146 bp, Artificial Sequence
  Bisulfite Padlock Probe
  misc_feature 94, 95, 96, 97, 98, 99: n = A,T,C or G
gactggaagagcactgttaaacttcaaactccaacacactcccgcgttggaggctcatcgttcctattcaggcagatgttatcgaggtccgacnnnnnncgcccgtcacccgcttacctataaaaagatcggatacgcatgaggct

SEQ ID NO: 1258 - DNA, 146 bp, Artificial Sequence
  Bisulfite Padlock Probe
  misc_feature 93, 94, 95, 96, 97, 98: n = A,T,C or G
gactggaagagcactgttaaacttcgaacctcacccaaaaccacgttggaggctcatcgttcctattcaggcagatgttatcgaggtccgacnnnnnnaaataataccaaacacaaataaacaaccgatcggatacgcatgaggct

SEQ ID NO: 1259 - DNA, 146 bp, Artificial Sequence
  Bisulfite Padlock Probe
  misc_feature 93, 94, 95, 96, 97, 98: n = A,T,C or G
gactggaagagcactgttaaacttcgaacctcacccaaaaccgcgttggaggctcatcgttcctattcaggcagatgttatcgaggtccgacnnnnnnaaataataccaaacgcaaataaacaaccgatcggatacgcatgaggct

SEQ ID NO: 1260 - DNA, 146 bp, Artificial Sequence
  Bisulfite Padlock Probe
  misc_feature 92, 93, 94, 95, 96, 97: n = A,T,C or G
gactggaagagcactgttaaacttcgacgaaactacaaaaaccgttggaggctcatcgttcctattcaggcagatgttatcgaggtccgacnnnnnngaacgaaacgacgtaaatcgaacaaaaacgatcggatacgcatgaggct

SEQ ID NO: 1261 - DNA, 146 bp, Artificial Sequence
  Bisulfite Padlock Probe
  misc_feature 92, 93, 94, 95, 96, 97: n = A,T,C or G
gactggaagagcactgttaaacttcgacgaaactacgaaaaccgttggaggctcatcgttcctattcaggcagatgttatcgaggtccgacnnnnnngaacgaaacgacgtaaatcgaacgaaaacgatcggatacgcatgaggct

SEQ ID NO: 1262 - DNA, 146 bp, Artificial Sequence
  Bisulfite Padlock Probe
  misc_feature 95, 96, 97, 98, 99, 100: n = A,T,C or G
gactggaagagcactgttaaacttctacctccactccaaactacccgttggaggctcatcgttcctattcaggcagatgttatcgaggtccgacnnnnnncaaaaataaacgctcgaaccaaacccgatcggatacgcatgaggct

SEQ ID NO: 1263 - DNA, 146 bp, Artificial Sequence
  Bisulfite Padlock Probe
  misc_feature 95, 96, 97, 98, 99, 100: n = A,T,C or G
gactggaagagcactgttaaacttctacctccactccgaactacccgttggaggctcatcgttcctattcaggcagatgttatcgaggtccgacnnnnnncaaaaataaacgctcgaaccgaacccgatcggatacgcatgaggct

SEQ ID NO: 1264 - DNA, 146 bp, Artificial Sequence
  Bisulfite Padlock Probe
  misc_feature 92, 93, 94, 95, 96, 97: n = A,T,C or G
gactggaagagcactgttaaacttctcaatctctatccaaaacgttggaggctcatcgttcctattcaggcagatgttatcgaggtccgacnnnnnntaaaatatattattctctccctacaacccgatcggatacgcatgaggct

SEQ ID NO: 1265 - DNA, 146 bp, Artificial Sequence
  Bisulfite Padlock Probe
  misc_feature 92, 93, 94, 95, 96, 97: n = A,T,C or G
gactggaagagcactgttaaacttctcaatctctatccgaaacgttggaggctcatcgttcctattcaggcagatgttatcgaggtccgacnnnnnntaaaatatattattctctccctacgacccgatcggatacgcatgaggct

SEQ ID NO: 1266 - DNA, 146 bp, Artificial Sequence
  Bisulfite Padlock Probe
  misc_feature 92, 93, 94, 95, 96, 97: n = A,T,C or G
gactggaagagcactgttaaactttcttaaccaacaaataaacgttggaggctcatcgttcctattcaggcagatgttatcgaggtccgacnnnnnnaactctatactaccgaccctacactacccgatcggatacgcatgaggct

SEQ ID NO: 1267 - DNA, 146 bp, Artificial Sequence
  Bisulfite Padlock Probe
  misc_feature 92, 93, 94, 95, 96, 97: n = A,T,C or G
gactggaagagcactgttaaactttcttaaccgacaaataaacgttggaggctcatcgttcctattcaggcagatgttatcgaggtccgacnnnnnnaactctatactaccgaccctacgctacccgatcggatacgcatgaggct

SEQ ID NO: 1268 - DNA, 146 bp, Artificial Sequence
  Bisulfite Padlock Probe
  misc_feature 93, 94, 95, 96, 97, 98: n = A,T,C or G
gactggaagagcactgttaaataaaaacgccccacaaacaaaatgttggaggctcatcgttcctattcaggcagatgttatcgaggtccgacnnnnnnacccgacacaaaccactcaaaatttccagatcggatacgcatgaggct

SEQ ID NO: 1269 - DNA, 146 bp, Artificial Sequence
  Bisulfite Padlock Probe
  misc_feature 93, 94, 95, 96, 97, 98: n = A,T,C or G
gactggaagagcactgttaaataaaaacgccccgcaaacaaaatgttggaggctcatcgttcctattcaggcagatgttatcgaggtccgacnnnnnnacccgacacgaaccactcaaaatttccagatcggatacgcatgaggct

SEQ ID NO: 1270 - DNA, 146 bp, Artificial Sequence
  Bisulfite Padlock Probe
  misc_feature 95, 96, 97, 98, 99, 100: n = A,T,C or G
gactggaagagcactgttaaataaaaactaaaatcgccgtcccaacgttggaggctcatcgttcctattcaggcagatgttatcgaggtccgacnnnnnnaaaaacgctaacgtatacccacaaacgatcggatacgcatgaggct

SEQ ID NO: 1271 - DNA, 146 bp, Artificial Sequence
  Bisulfite Padlock Probe
  misc_feature 95, 96, 97, 98, 99, 100: n = A,T,C or G
gactggaagagcactgttaaataaaaactaaaatcgccgtcccgacgttggaggctcatcgttcctattcaggcagatgttatcgaggtccgacnnnnnnaaaaacgctaacgtatacccgcaaacgatcggatacgcatgaggct

SEQ ID NO: 1272 - DNA, 146 bp, Artificial Sequence
  Bisulfite Padlock Probe
  misc_feature 96, 97, 98, 99, 100, 101: n = A,T,C or G
gactggaagagcactgttaaataaaaatttccacctaaaacaaataagttggaggctcatcgttcctattcaggcagatgttatcgaggtccgacnnnnnncccacacccaaaacaccctttctaagatcggatacgcatgaggct

SEQ ID NO: 1273 - DNA, 146 bp, Artificial Sequence
  Bisulfite Padlock Probe
  misc_feature 96, 97, 98, 99, 100, 101: n = A,T,C or G
gactggaagagcactgttaaataaaaatttccacctaaaacaaataagttggaggctcatcgttcctattcaggcagatgttatcgaggtccgacnnnnnncccacacccgaaacaccctttctaagatcggatacgcatgaggct

SEQ ID NO: 1274 - DNA, 146 bp, Artificial Sequence
  Bisulfite Padlock Probe
  misc_feature 92, 93, 94, 95, 96, 97: n = A,T,C or G
gactggaagagcactgttaaataaaaccaaaccaaacccatccgttggaggctcatcgttcctattcaggcagatgttatcgaggtccgacnnnnnnctaacgacaacgaaaacgcaaaccctaaagatcggatacgcatgaggct

SEQ ID NO: 1275 - DNA, 146 bp, Artificial Sequence
  Bisulfite Padlock Probe
  misc_feature 96, 97, 98, 99, 100, 101: n = A,T,C or G
gactggaagagcactgttaaataaaaccaaacctcaactacaaaaatgttggaggctcatcgttcctattcaggcagatgttatcgaggtccgacnnnnnntaacttaaacgccgccaactcctccgatcggatacgcatgaggct

SEQ ID NO: 1276 - DNA, 146 bp, Artificial Sequence
  Bisulfite Padlock Probe
  misc_feature 95, 96, 97, 98, 99, 100: n = A,T,C or G
gactggaagagcactgttaaataaaacccacaaaccccacttacacgttggaggctcatcgttcctattcaggcagatgttatcgaggtccgacnnnnnnaaatataaaaaccactcttctttcttgatcggatacgcatgaggct

SEQ ID NO: 1277 - DNA, 146 bp, Artificial Sequence
  Bisulfite Padlock Probe
  misc_feature 92, 93, 94, 95, 96, 97: n = A,T,C or G
gactggaagagcactgttaaataaaaccgaaccaaacccatccgttggaggctcatcgttcctattcaggcagatgttatcgaggtccgacnnnnnnctaacgacaacgaaaacgcgaaccctaaagatcggatacgcatgaggct

SEQ ID NO: 1278 - DNA, 146 bp, Artificial Sequence
  Bisulfite Padlock Probe
  misc_feature 96, 97, 98, 99, 100, 101: n = A,T,C or G
gactggaagagcactgttaaataaaaccgaacctcaactacaaaaatgttggaggctcatcgttcctattcaggcagatgttatcgaggtccgacnnnnnntaacttaaacgccgccgactcctccgatcggatacgcatgaggct

SEQ ID NO: 1279 - DNA, 146 bp, Artificial Sequence
  Bisulfite Padlock Probe
  misc_feature 96, 97, 98, 99, 100, 101: n = A,T,C or G
gactggaagagcactgttaaataaaaccgcgctcgcaattaacaaccgttggaggctcatcgttcctattcaggcagatgttatcgaggtccgacnnnnnnaaaacgacgcgaaacgacctaacaagatcggatacgcatgaggct

SEQ ID NO: 1280 - DNA, 146 bp, Artificial Sequence
  Bisulfite Padlock Probe
  misc_feature 96, 97, 98, 99, 100, 101: n = A,T,C or G
gactggaagagcactgttaaataaaaccgcgctcgcaattaacgaccgttggaggctcatcgttcctattcaggcagatgttatcgaggtccgacnnnnnnaaaacgacgcgaaacgacctaacgagatcggatacgcatgaggct

SEQ ID NO: 1281 - DNA, 146 bp, Artificial Sequence
  Bisulfite Padlock Probe
  misc_feature 92, 93, 94, 95, 96, 97: n = A,T,C or G
gactggaagagcactgttaaataaaacctaaattaacaccccagttggaggctcatcgttcctattcaggcagatgttatcgaggtccgacnnnnnnaaaactaaatttataacctcccctaacccgatcggatacgcatgaggct

SEQ ID NO: 1282 - DNA, 146 bp, Artificial Sequence
  Bisulfite Padlock Probe
  misc_feature 95, 96, 97, 98, 99, 100: n = A,T,C or G
gactggaagagcactgttaaataaaacgttccgaaacgacaaatacgttggaggctcatcgttcctattcaggcagatgttatcgaggtccgacnnnnnnacgaaaccgccgaaaattaaccaaaagatcggatacgcatgaggct

SEQ ID NO: 1283 - DNA, 146 bp, Artificial Sequence
  Bisulfite Padlock Probe
  misc_feature 95, 96, 97, 98, 99, 100: n = A,T,C or G
gactggaagagcactgttaaataaaacgttccgaaacgacgaatacgttggaggctcatcgttcctattcaggcagatgttatcgaggtccgacnnnnnnacgaaaccgccgaaaattaaccgaaagatcggatacgcatgaggct

SEQ ID NO: 1284 - DNA, 146 bp, Artificial Sequence
  Bisulfite Padlock Probe
  misc_feature 92, 93, 94, 95, 96, 97: n = A,T,C or G
gactggaagagcactgttaaataaaactaaatataaatcttccgttggaggctcatcgttcctattcaggcagatgttatcgaggtccgacnnnnnnacttcttactaaatacattaatttttattgatcggatacgcatgaggct

SEQ ID NO: 1285 - DNA, 146 bp, Artificial Sequence
  Bisulfite Padlock Probe
  misc_feature 96, 97, 98, 99, 100, 101: n = A,T,C or G
gactggaagagcactgttaaataaaataaaaattcaacaaaacccacgttggaggctcatcgttcctattcaggcagatgttatcgaggtccgacnnnnnnctaccacgcaccacacctactatccgatcggatacgcatgaggct

SEQ ID NO: 1286 - DNA, 146 bp, Artificial Sequence
  Bisulfite Padlock Probe
  misc_feature 96, 97, 98, 99, 100, 101: n = A,T,C or G
gactggaagagcactgttaaataaaataaaaattcaacaaaacccgcgttggaggctcatcgttcctattcaggcagatgttatcgaggtccgacnnnnnnctaccacgcaccgcacctactatccgatcggatacgcatgaggct

SEQ ID NO: 1287 - DNA, 146 bp, Artificial Sequence
  Bisulfite Padlock Probe
  misc_feature 94, 95, 96, 97, 98, 99: n = A,T,C or G
gactggaagagcactgttaaataaacctaactccaaaaccccaacgttggaggctcatcgttcctattcaggcagatgttatcgaggtccgacnnnnnnaaaaatcccgaacgaccgaaaacaatagatcggatacgcatgaggct

SEQ ID NO: 1288 - DNA, 146 bp, Artificial Sequence
  Bisulfite Padlock Probe
  misc_feature 94, 95, 96, 97, 98, 99: n = A,T,C or G
gactggaagagcactgttaaataaacctaactccaaaaccccaacgttggaggctcatcgttcctattcaggcagatgttatcgaggtccgacnnnnnnaaaaatcccgaacgaccgaaaacgatagatcggatacgcatgaggct

SEQ ID NO: 1289 - DNA, 146 bp, Artificial Sequence
  Bisulfite Padlock Probe
  misc_feature 92, 93, 94, 95, 96, 97: n = A,T,C or G
gactggaagagcactgttaaataaacgaaataaaaacaacaacgttggaggctcatcgttcctattcaggcagatgttatcgaggtccgacnnnnnnaaaaatacaacaattaaaaataaaaacatgatcggatacgcatgaggct

SEQ ID NO: 1290 - DNA, 146 bp, Artificial Sequence
  Bisulfite Padlock Probe
  misc_feature 92, 93, 94, 95, 96, 97: n = A,T,C or G
gactggaagagcactgttaaataaacgaaataaaaacgacaacgttggaggctcatcgttcctattcaggcagatgttatcgaggtccgacnnnnnnaaaaatacaacaattaaaaataaaaacatgatcggatacgcatgaggct

SEQ ID NO: 1291 - DNA, 146 bp, Artificial Sequence
  Bisulfite Padlock Probe
  misc_feature 95, 96, 97, 98, 99, 100: n = A,T,C or G
gactggaagagcactgttaaataaactcaaaatttaaaaccaaaaagttggaggctcatcgttcctattcaggcagatgttatcgaggtccgacnnnnnncgaatacccaaaccaaaactatatacgatcggatacgcatgaggct

SEQ ID NO: 1292 - DNA, 146 bp, Artificial Sequence
  Bisulfite Padlock Probe
  misc_feature 95, 96, 97, 98, 99, 100: n = A,T,C or G
gactggaagagcactgttaaataaactcgaaatttaaaaccaaaaagttggaggctcatcgttcctattcaggcagatgttatcgaggtccgacnnnnnncgaatacccaaaccgaaactatatacgatcggatacgcatgaggct

SEQ ID NO: 1293 - DNA, 146 bp, Artificial Sequence
  Bisulfite Padlock Probe
  misc_feature 94, 95, 96, 97, 98, 99: n = A,T,C or G
gactggaagagcactgttaaataaatccaaatttatttataaaatgttggaggctcatcgttcctattcaggcagatgttatcgaggtccgacnnnnnnactaaaataaaatttaaaaataaactagatcggatacgcatgaggct

SEQ ID NO: 1294 - DNA, 146 bp, Artificial Sequence
  Bisulfite Padlock Probe
  misc_feature 94, 95, 96, 97, 98, 99: n = A,T,C or G
gactggaagagcactgttaaataaatttttaaaatctccatcaaagttggaggctcatcgttcctattcaggcagatgttatcgaggtccgacnnnnnncacctatactaccccctacaactacccgatcggatacgcatgaggct

SEQ ID NO: 1295 - DNA, 146 bp, Artificial Sequence
  Bisulfite Padlock Probe
  misc_feature 94, 95, 96, 97, 98, 99: n = A,T,C or G
gactggaagagcactgttaaataaatttttaaaatctccatcaaagttggaggctcatcgttcctattcaggcagatgttatcgaggtccgacnnnnnncacctatactaccccctacgactacccgatcggatacgcatgaggct

SEQ ID NO: 1296 - DNA, 146 bp, Artificial Sequence
  Bisulfite Padlock Probe
  misc_feature 92, 93, 94, 95, 96, 97: n = A,T,C or G
gactggaagagcactgttaaataacctctttacccacaaactagttggaggctcatcgttcctattcaggcagatgttatcgaggtccgacnnnnnntaaattcctattttctacccaaacccctcgatcggatacgcatgaggct

SEQ ID NO: 1297 - DNA, 146 bp, Artificial Sequence
  Bisulfite Padlock Probe
  misc_feature 92, 93, 94, 95, 96, 97: n = A,T,C or G
gactggaagagcactgttaaataacctctttacccgcaaactagttggaggctcatcgttcctattcaggcagatgttatcgaggtccgacnnnnnntaaattcctattttctacccaaacccctcgatcggatacgcatgaggct

SEQ ID NO: 1298 - DNA, 146 bp, Artificial Sequence
  Bisulfite Padlock Probe
  misc_feature 93, 94, 95, 96, 97, 98: n = A,T,C or G
gactggaagagcactgttaaataacgcaataacctacacaccccgttggaggctcatcgttcctattcaggcagatgttatcgaggtccgacnnnnnnctaaacctaaaacccacaaatcccaaacgatcggatacgcatgaggct

SEQ ID NO: 1299 - DNA, 146 bp, Artificial Sequence
  Bisulfite Padlock Probe
  misc_feature 93, 94, 95, 96, 97, 98: n = A,T,C or G
gactggaagagcactgttaaataacgcgataacctacacaccccgttggaggctcatcgttcctattcaggcagatgttatcgaggtccgacnnnnnnctaaacctaaaacccgcaaatcccaaacgatcggatacgcatgaggct

SEQ ID NO: 1300 - DNA, 146 bp, Artificial Sequence
  Bisulfite Padlock Probe
  misc_feature 92, 93, 94, 95, 96, 97: n = A,T,C or G
gactggaagagcactgttaaataacgtatccccgtcccacctcgttggaggctcatcgttcctattcaggcagatgttatcgaggtccgacnnnnnnaatcgtaattcccccgatactactcacctgatcggatacgcatgaggct

SEQ ID NO: 1301 - DNA, 146 bp, Artificial Sequence
  Bisulfite Padlock Probe
  misc_feature 92, 93, 94, 95, 96, 97: n = A,T,C or G
gactggaagagcactgttaaataacgtatccccgtcccgcctcgttggaggctcatcgttcctattcaggcagatgttatcgaggtccgacnnnnnnaatcgtaattcccccgatactactcgcctgatcggatacgcatgaggct

SEQ ID NO: 1302 - DNA, 146 bp, Artificial Sequence
  Bisulfite Padlock Probe
  misc_feature 93, 94, 95, 96, 97, 98: n = A,T,C or G
gactggaagagcactgttaaataatcgcaccaacaaaaatcacagttggaggctcatcgttcctattcaggcagatgttatcgaggtccgacnnnnnnacattatacaaactcccaaaatcaaatcgatcggatacgcatgaggct

SEQ ID NO: 1303 - DNA, 146 bp, Artificial Sequence
  Bisulfite Padlock Probe
  misc_feature 93, 94, 95, 96, 97, 98: n = A,T,C or G
gactggaagagcactgttaaataatcgcaccgacaaaaatcacagttggaggctcatcgttcctattcaggcagatgttatcgaggtccgacnnnnnnacattatacaaactcccgaaatcaaatcgatcggatacgcatgaggct

SEQ ID NO: 1304 - DNA, 146 bp, Artificial Sequence
  Bisulfite Padlock Probe
  misc_feature 94, 95, 96, 97, 98, 99: n = A,T,C or G
gactggaagagcactgttaaataatctccaaataaacctaatttcgttggaggctcatcgttcctattcaggcagatgttatcgaggtccgacnnnnnnaaaatttacacattcaaaaacctccttgatcggatacgcatgaggct

SEQ ID NO: 1305 - DNA, 146 bp, Artificial Sequence
  Bisulfite Padlock Probe
  misc_feature 96, 97, 98, 99, 100, 101: n = A,T,C or G
gactggaagagcactgttaaataatcttatcactcacataattcctagttggaggctcatcgttcctattcaggcagatgttatcgaggtccgacnnnnnnctaaaaacgcgaacgacgcgacaacgatcggatacgcatgaggct

SEQ ID NO: 1306 - DNA, 146 bp, Artificial Sequence
  Bisulfite Padlock Probe
  misc_feature 96, 97, 98, 99, 100, 101: n = A,T,C or G
gactggaagagcactgttaaataatcttatcgctcacataattcctagttggaggctcatcgttcctattcaggcagatgttatcgaggtccgacnnnnnnctaaaaacgcgaacgacgcgacgacgatcggatacgcatgaggct

SEQ ID NO: 1307 - DNA, 146 bp, Artificial Sequence
  Bisulfite Padlock Probe
  misc_feature 93, 94, 95, 96, 97, 98: n = A,T,C or G
gactggaagagcactgttaaatacaaaaacgatcgcactaaaccgttggaggctcatcgttcctattcaggcagatgttatcgaggtccgacnnnnnnctaaaacgcccaaacaacgacataaatcgatcggatacgcatgaggct

SEQ ID NO: 1308 - DNA, 146 bp, Artificial Sequence
  Bisulfite Padlock Probe
  misc_feature 93, 94, 95, 96, 97, 98: n = A,T,C or G
gactggaagagcactgttaaatacaaaaacgatcgcgctaaaccgttggaggctcatcgttcctattcaggcagatgttatcgaggtccgacnnnnnnctaaaacgcccaaacaacgacgtaaatcgatcggatacgcatgaggct

SEQ ID NO: 1309 - DNA, 146 bp, Artificial Sequence
  Bisulfite Padlock Probe
  misc_feature 96, 97, 98, 99, 100, 101: n = A,T,C or G
gactggaagagcactgttaaatacaaataaaacgcaacgacaaaaatgttggaggctcatcgttcctattcaggcagatgttatcgaggtccgacnnnnnnaaaaatcgaactacgcgctacacccgatcggatacgcatgaggct

SEQ ID NO: 1310 - DNA, 146 bp, Artificial Sequence
  Bisulfite Padlock Probe
  misc_feature 96, 97, 98, 99, 100, 101: n = A,T,C or G
gactggaagagcactgttaaatacaaataaaacgcaacgacgaaaatgttggaggctcatcgttcctattcaggcagatgttatcgaggtccgacnnnnnnaaaaatcgaactacgcgctacgcccgatcggatacgcatgaggct

SEQ ID NO: 1311 - DNA, 146 bp, Artificial Sequence
  Bisulfite Padlock Probe
  misc_feature 95, 96, 97, 98, 99, 100: n = A,T,C or G
gactggaagagcactgttaaatacaaccacctataaacaaatacccgttggaggctcatcgttcctattcaggcagatgttatcgaggtccgacnnnnnncacacccaaaaattcccaaaaacaccgatcggatacgcatgaggct

SEQ ID NO: 1312 - DNA, 146 bp, Artificial Sequence
  Bisulfite Padlock Probe
  misc_feature 95, 96, 97, 98, 99, 100: n = A,T,C or G
gactggaagagcactgttaaatacaaccacctataaacgaatacccgttggaggctcatcgttcctattcaggcagatgttatcgaggtccgacnnnnnncacacccaaaaattcccgaaaacaccgatcggatacgcatgaggct

SEQ ID NO: 1313 - DNA, 146 bp, Artificial Sequence
  Bisulfite Padlock Probe
  misc_feature 96, 97, 98, 99, 100, 101: n = A,T,C or G
gactggaagagcactgttaaatacatttaatttaacttttactcaaagttggaggctcatcgttcctattcaggcagatgttatcgaggtccgacnnnnnnaaaacgaattctccccacgcaaatcgatcggatacgcatgaggct

SEQ ID NO: 1314 - DNA, 146 bp, Artificial Sequence
  Bisulfite Padlock Probe
  misc_feature 96, 97, 98, 99, 100, 101: n = A,T,C or G
gactggaagagcactgttaaatacatttaatttaacttttactcaaagttggaggctcatcgttcctattcaggcagatgttatcgaggtccgacnnnnnnaaaacgaattctccccacgcgaatcgatcggatacgcatgaggct

SEQ ID NO: 1315 - DNA, 146 bp, Artificial Sequence
  Bisulfite Padlock Probe
  misc_feature 96, 97, 98, 99, 100, 101: n = A,T,C or G
gactggaagagcactgttaaataccaatttaaaatcttatatcctacgttggaggctcatcgttcctattcaggcagatgttatcgaggtccgacnnnnnnctttacaaaatttctcctaactatcgatcggatacgcatgaggct

SEQ ID NO: 1316 - DNA, 146 bp, Artificial Sequence
  Bisulfite Padlock Probe
  misc_feature 96, 97, 98, 99, 100, 101: n = A,T,C or G
gactggaagagcactgttaaataccaatttaaaatcttatatcctacgttggaggctcatcgttcctattcaggcagatgttatcgaggtccgacnnnnnnctttacgaaatttctcctaactatcgatcggatacgcatgaggct

SEQ ID NO: 1317 - DNA, 146 bp, Artificial Sequence
  Bisulfite Padlock Probe
  misc_feature 92, 93, 94, 95, 96, 97: n = A,T,C or G
gactggaagagcactgttaaatacccctaccccatcctcttccgttggaggctcatcgttcctattcaggcagatgttatcgaggtccgacnnnnnncctttaccgaaaacaattcccaaaacctagatcggatacgcatgaggct

SEQ ID NO: 1318 - DNA, 146 bp, Artificial Sequence
  Bisulfite Padlock Probe
  misc_feature 92, 93, 94, 95, 96, 97: n = A,T,C or G
gactggaagagcactgttaaatacccctaccccatcctcttccgttggaggctcatcgttcctattcaggcagatgttatcgaggtccgacnnnnnncctttaccgaaaacaattcccgaaacctagatcggatacgcatgaggct

SEQ ID NO: 1319 - DNA, 146 bp, Artificial Sequence
  Bisulfite Padlock Probe
  misc_feature 92, 93, 94, 95, 96, 97: n = A,T,C or G
gactggaagagcactgttaaataccgaaataccaccaaaattcgttggaggctcatcgttcctattcaggcagatgttatcgaggtccgacnnnnnnacatttctcttctttcacttctaatccacgatcggatacgcatgaggct

SEQ ID NO: 1320 - DNA, 146 bp, Artificial Sequence
  Bisulfite Padlock Probe
  misc_feature 92, 93, 94, 95, 96, 97: n = A,T,C or G
gactggaagagcactgttaaataccgaaataccgccaaaattcgttggaggctcatcgttcctattcaggcagatgttatcgaggtccgacnnnnnnacatttctcttctttcgcttctaatccacgatcggatacgcatgaggct

SEQ ID NO: 1321 - DNA, 146 bp, Artificial Sequence
  Bisulfite Padlock Probe
  misc_feature 93, 94, 95, 96, 97, 98: n = A,T,C or G
gactggaagagcactgttaaataccgtccgcaataacaataaccgttggaggctcatcgttcctattcaggcagatgttatcgaggtccgacnnnnnnaaaaccgaaacgcaaccgaaaaccaaaagatcggatacgcatgaggct

SEQ ID NO: 1322 - DNA, 146 bp, Artificial Sequence
  Bisulfite Padlock Probe
  misc_feature 93, 94, 95, 96, 97, 98: n = A,T,C or G
gactggaagagcactgttaaataccgtccgcgataacaataaccgttggaggctcatcgttcctattcaggcagatgttatcgaggtccgacnnnnnnaaaaccgaaacgcaaccgaaaaccgaaagatcggatacgcatgaggct

SEQ ID NO: 1323 - DNA, 146 bp, Artificial Sequence
  Bisulfite Padlock Probe
  misc_feature 95, 96, 97, 98, 99, 100: n = A,T,C or G
gactggaagagcactgttaaatacctcctctaaacctaaactaaacgttggaggctcatcgttcctattcaggcagatgttatcgaggtccgacnnnnnnaaaaacaactacaaaacttcctctccgatcggatacgcatgaggct

SEQ ID NO: 1324 - DNA, 146 bp, Artificial Sequence
  Bisulfite Padlock Probe
  misc_feature 95, 96, 97, 98, 99, 100: n = A,T,C or G
gactggaagagcactgttaaatacctcctctaaacctaaactaaacgttggaggctcatcgttcctattcaggcagatgttatcgaggtccgacnnnnnnaaaaacaactacgaaacttcctctccgatcggatacgcatgaggct

SEQ ID NO: 1325 - DNA, 146 bp, Artificial Sequence
  Bisulfite Padlock Probe
  misc_feature 92, 93, 94, 95, 96, 97: n = A,T,C or G
gactggaagagcactgttaaatacctcgacccgaccacaacacgttggaggctcatcgttcctattcaggcagatgttatcgaggtccgacnnnnnnaaaatccgaacgctaactaatcgaacaccgatcggatacgcatgaggct

SEQ ID NO: 1326 - DNA, 146 bp, Artificial Sequence
  Bisulfite Padlock Probe
  misc_feature 92, 93, 94, 95, 96, 97: n = A,T,C or G
gactggaagagcactgttaaatacctcgacccgaccgcaacacgttggaggctcatcgttcctattcaggcagatgttatcgaggtccgacnnnnnnaaaatccgaacgctaactaatcgaacgccgatcggatacgcatgaggct

SEQ ID NO: 1327 - DNA, 146 bp, Artificial Sequence
  Bisulfite Padlock Probe
  misc_feature 92, 93, 94, 95, 96, 97: n = A,T,C or G
gactggaagagcactgttaaatacgaacgatcctccccgacacgttggaggctcatcgttcctattcaggcagatgttatcgaggtccgacnnnnnnaaaaactaccaaaaaccaactaaacaaaagatcggatacgcatgaggct

SEQ ID NO: 1328 - DNA, 146 bp, Artificial Sequence
  Bisulfite Padlock Probe
  misc_feature 92, 93, 94, 95, 96, 97: n = A,T,C or G
gactggaagagcactgttaaatacgaacgatcctccccgacgcgttggaggctcatcgttcctattcaggcagatgttatcgaggtccgacnnnnnnaaaaactaccaaaaaccaactaaacaaaagatcggatacgcatgaggct

SEQ ID NO: 1329 - DNA, 146 bp, Artificial Sequence
  Bisulfite Padlock Probe
  misc_feature 93, 94, 95, 96, 97, 98: n = A,T,C or G
gactggaagagcactgttaaatacgcaatacaccaaaatcttccgttggaggctcatcgttcctattcaggcagatgttatcgaggtccgacnnnnnntcttttatcctatatatataataaacttgatcggatacgcatgaggct

SEQ ID NO: 1330 - DNA, 146 bp, Artificial Sequence
  Bisulfite Padlock Probe
  misc_feature 93, 94, 95, 96, 97, 98: n = A,T,C or G
gactggaagagcactgttaaatacgcaatacgccaaaatcttccgttggaggctcatcgttcctattcaggcagatgttatcgaggtccgacnnnnnntcttttatcctatatatataataaacttgatcggatacgcatgaggct

SEQ ID NO: 1331 - DNA, 146 bp, Artificial Sequence
  Bisulfite Padlock Probe
  misc_feature 92, 93, 94, 95, 96, 97: n = A,T,C or G
gactggaagagcactgttaaatacgcccaaaacgcaaccaaacgttggaggctcatcgttcctattcaggcagatgttatcgaggtccgacnnnnnnaaaaacgacgaaccgaaaacaccaaaaaagatcggatacgcatgaggct

SEQ ID NO: 1332 - DNA, 146 bp, Artificial Sequence
  Bisulfite Padlock Probe
  misc_feature 92, 93, 94, 95, 96, 97: n = A,T,C or G
gactggaagagcactgttaaatacgcccaaaacgcaaccgaacgttggaggctcatcgttcctattcaggcagatgttatcgaggtccgacnnnnnnaaaaacgacgaaccgaaaacaccgaaaaagatcggatacgcatgaggct

SEQ ID NO: 1333 - DNA, 146 bp, Artificial Sequence
  Bisulfite Padlock Probe
  misc_feature 92, 93, 94, 95, 96, 97: n = A,T,C or G
gactggaagagcactgttaaatacgcccgcactaaaaaccctcgttggaggctcatcgttcctattcaggcagatgttatcgaggtccgacnnnnnnaaaacccttctccaaccatccttacactcgatcggatacgcatgaggct

SEQ ID NO: 1334 - DNA, 146 bp, Artificial Sequence
  Bisulfite Padlock Probe
  misc_feature 92, 93, 94, 95, 96, 97: n = A,T,C or G
gactggaagagcactgttaaatacgcccgcgctaaaaaccctcgttggaggctcatcgttcctattcaggcagatgttatcgaggtccgacnnnnnnaaaacccttctccaaccatccttacgctcgatcggatacgcatgaggct

SEQ ID NO: 1335 - DNA, 146 bp, Artificial Sequence
  Bisulfite Padlock Probe
  misc_feature 92, 93, 94, 95, 96, 97: n = A,T,C or G
gactggaagagcactgttaaatacgcgttcctcctcccacatagttggaggctcatcgttcctattcaggcagatgttatcgaggtccgacnnnnnntaaactaaaaacccaaacactaatacttcgatcggatacgcatgaggct

SEQ ID NO: 1336 - DNA, 146 bp, Artificial Sequence
  Bisulfite Padlock Probe
  misc_feature 92, 93, 94, 95, 96, 97: n = A,T,C or G
gactggaagagcactgttaaatacgcgttcctcctcccgcatagttggaggctcatcgttcctattcaggcagatgttatcgaggtccgacnnnnnntaaactaaaaacccgaacactaatacttcgatcggatacgcatgaggct

SEQ ID NO: 1337 - DNA, 146 bp, Artificial Sequence
  Bisulfite Padlock Probe
  misc_feature 96, 97, 98, 99, 100, 101: n = A,T,C or G
gactggaagagcactgttaaatataaacccgaaaaccataaactcctgttggaggctcatcgttcctattcaggcagatgttatcgaggtccgacnnnnnnaaactttcaaacacaatttaaaattgatcggatacgcatgaggct

SEQ ID NO: 1338 - DNA, 146 bp, Artificial Sequence
  Bisulfite Padlock Probe
  misc_feature 96, 97, 98, 99, 100, 101: n = A,T,C or G
gactggaagagcactgttaaatataaacccgaaaaccgtaaactcctgttggaggctcatcgttcctattcaggcagatgttatcgaggtccgacnnnnnnaaactttcaaacacaatttaaaattgatcggatacgcatgaggct

SEQ ID NO: 1339 - DNA, 146 bp, Artificial Sequence
  Bisulfite Padlock Probe
  misc_feature 92, 93, 94, 95, 96, 97: n = A,T,C or G
gactggaagagcactgttaaatatccctaaaactttaaaccctgttggaggctcatcgttcctattcaggcagatgttatcgaggtccgacnnnnnnacctatattaataaaattaataattaattgatcggatacgcatgaggct

SEQ ID NO: 1340 - DNA, 146 bp, Artificial Sequence
  Bisulfite Padlock Probe
  misc_feature 96, 97, 98, 99, 100, 101: n = A,T,C or G
gactggaagagcactgttaaatatcgaaacacacctaaaacctccccgttggaggctcatcgttcctattcaggcagatgttatcgaggtccgacnnnnnnctatcgtcaaatataacccaaacacgatcggatacgcatgaggct

SEQ ID NO: 1341 - DNA, 146 bp, Artificial Sequence
  Bisulfite Padlock Probe
  misc_feature 96, 97, 98, 99, 100, 101: n = A,T,C or G
gactggaagagcactgttaaatatcgaaacgcacctaaaacctccccgttggaggctcatcgttcctattcaggcagatgttatcgaggtccgacnnnnnnctatcgtcaaatataacccaaacgcgatcggatacgcatgaggct

SEQ ID NO: 1342 - DNA, 146 bp, Artificial Sequence
  Bisulfite Padlock Probe
  misc_feature 92, 93, 94, 95, 96, 97: n = A,T,C or G
gactggaagagcactgttaaatcaacaaatactaaccaaaaaagttggaggctcatcgttcctattcaggcagatgttatcgaggtccgacnnnnnnaacaaaaaccccttccacgaaaatccaaagatcggatacgcatgaggct

SEQ ID NO: 1343 - DNA, 146 bp, Artificial Sequence
  Bisulfite Padlock Probe
  misc_feature 92, 93, 94, 95, 96, 97: n = A,T,C or G
gactggaagagcactgttaaatcaacaaatactaaccgaaaaagttggaggctcatcgttcctattcaggcagatgttatcgaggtccgacnnnnnnaacaaaaaccccttccacgaaaatccgaagatcggatacgcatgaggct

SEQ ID NO: 1344 - DNA, 146 bp, Artificial Sequence
  Bisulfite Padlock Probe
  misc_feature 93, 94, 95, 96, 97, 98: n = A,T,C or G
gactggaagagcactgttaaatcaatatttcaaaataaattctcgttggaggctcatcgttcctattcaggcagatgttatcgaggtccgacnnnnnnaccaaaactaaacaaaatctttactaaagatcggatacgcatgaggct

SEQ ID NO: 1345 - DNA, 146 bp, Artificial Sequence
  Bisulfite Padlock Probe
  misc_feature 92, 93, 94, 95, 96, 97: n = A,T,C or G
gactggaagagcactgttaaatcactaaaacaacaacaccaaagttggaggctcatcgttcctattcaggcagatgttatcgaggtccgacnnnnnnaaaacccacaacaacaaaaactcccaaaagatcggatacgcatgaggct

SEQ ID NO: 1346 - DNA, 146 bp, Artificial Sequence
  Bisulfite Padlock Probe
  misc_feature 92, 93, 94, 95, 96, 97: n = A,T,C or G
gactggaagagcactgttaaatcactaaaacaacgacaccaaagttggaggctcatcgttcctattcaggcagatgttatcgaggtccgacnnnnnnaaaacccacaacgacaaaaactcccaaaagatcggatacgcatgaggct

SEQ ID NO: 1347 - DNA, 146 bp, Artificial Sequence
  Bisulfite Padlock Probe
  misc_feature 95, 96, 97, 98, 99, 100: n = A,T,C or G
gactggaagagcactgttaaatcataaaataaaataaaactaaaacgttggaggctcatcgttcctattcaggcagatgttatcgaggtccgacnnnnnnacttcaaaactaacttaataaaaaccgatcggatacgcatgaggct

SEQ ID NO: 1348 - DNA, 146 bp, Artificial Sequence
  Bisulfite Padlock Probe
  misc_feature 92, 93, 94, 95, 96, 97: n = A,T,C or G
gactggaagagcactgttaaatcatactaactacacatataatgttggaggctcatcgttcctattcaggcagatgttatcgaggtccgacnnnnnnaaaaattcctcaactactatatctaataagatcggatacgcatgaggct

SEQ ID NO: 1349 - DNA, 146 bp, Artificial Sequence
  Bisulfite Padlock Probe
  misc_feature 92, 93, 94, 95, 96, 97: n = A,T,C or G
gactggaagagcactgttaaatcatcctaaaatcaatctaaacgttggaggctcatcgttcctattcaggcagatgttatcgaggtccgacnnnnnncttcacctaaaactcaaaaaccaaaaaccgatcggatacgcatgaggct

SEQ ID NO: 1350 - DNA, 146 bp, Artificial Sequence
  Bisulfite Padlock Probe
  misc_feature 92, 93, 94, 95, 96, 97: n = A,T,C or G
gactggaagagcactgttaaatccaaaaacacataacaactacgttggaggctcatcgttcctattcaggcagatgttatcgaggtccgacnnnnnntatccgcaacattttaaacatcttctacagatcggatacgcatgaggct

SEQ ID NO: 1351 - DNA, 146 bp, Artificial Sequence
  Bisulfite Padlock Probe
  misc_feature 92, 93, 94, 95, 96, 97: n = A,T,C or G
gactggaagagcactgttaaatccaaaaacacgtaacaactacgttggaggctcatcgttcctattcaggcagatgttatcgaggtccgacnnnnnntatccgcaacgttttaaacatcttctacagatcggatacgcatgaggct

SEQ ID NO: 1352 - DNA, 146 bp, Artificial Sequence
  Bisulfite Padlock Probe
  misc_feature 93, 94, 95, 96, 97, 98: n = A,T,C or G
gactggaagagcactgttaaatccaaactaaaaccgaaatccacgttggaggctcatcgttcctattcaggcagatgttatcgaggtccgacnnnnnncctcatcaacctccacaccctcaaaaccgatcggatacgcatgaggct

SEQ ID NO: 1353 - DNA, 146 bp, Artificial Sequence
  Bisulfite Padlock Probe
  misc_feature 93, 94, 95, 96, 97, 98: n = A,T,C or G
gactggaagagcactgttaaatccaaactaaaaccgaaatccgcgttggaggctcatcgttcctattcaggcagatgttatcgaggtccgacnnnnnncctcatcaacctccacaccctcaaaaccgatcggatacgcatgaggct

SEQ ID NO: 1354 - DNA, 146 bp, Artificial Sequence
  Bisulfite Padlock Probe
  misc_feature 95, 96, 97, 98, 99, 100: n = A,T,C or G
gactggaagagcactgttaaatccatctccaaaataacctacaaaagttggaggctcatcgttcctattcaggcagatgttatcgaggtccgacnnnnnnaaaacaaacgaacaattctcaaaaaagatcggatacgcatgaggct

SEQ ID NO: 1355 - DNA, 146 bp, Artificial Sequence
  Bisulfite Padlock Probe
  misc_feature 95, 96, 97, 98, 99, 100: n = A,T,C or G
gactggaagagcactgttaaatccatctccgaaataacctacaaaagttggaggctcatcgttcctattcaggcagatgttatcgaggtccgacnnnnnnaaaacaaacgaacaattctcgaaaaagatcggatacgcatgaggct

SEQ ID NO: 1356 - DNA, 146 bp, Artificial Sequence
  Bisulfite Padlock Probe
  misc_feature 92, 93, 94, 95, 96, 97: n = A,T,C or G
gactggaagagcactgttaaatcccaaattacccaaaaaacccgttggaggctcatcgttcctattcaggcagatgttatcgaggtccgacnnnnnnacaaccccctcctcccctacaaaatacatgatcggatacgcatgaggct

SEQ ID NO: 1357 - DNA, 146 bp, Artificial Sequence
  Bisulfite Padlock Probe
  misc_feature 92, 93, 94, 95, 96, 97: n = A,T,C or G
gactggaagagcactgttaaatcccaaattacccgaaaaacccgttggaggctcatcgttcctattcaggcagatgttatcgaggtccgacnnnnnnacaaccccctcctcccctacaaaatacatgatcggatacgcatgaggct

SEQ ID NO: 1358 - DNA, 146 bp, Artificial Sequence
  Bisulfite Padlock Probe
  misc_feature 93, 94, 95, 96, 97, 98: n = A,T,C or G
gactggaagagcactgttaaatccccgccgcctaaaacaaaaaagttggaggctcatcgttcctattcaggcagatgttatcgaggtccgacnnnnnnaacgcaaaacgaaacaccaaaaactaccgatcggatacgcatgaggct

SEQ ID NO: 1359 - DNA, 146 bp, Artificial Sequence
  Bisulfite Padlock Probe
  misc_feature 93, 94, 95, 96, 97, 98: n = A,T,C or G
gactggaagagcactgttaaatccccgccgcctaaaacgaaaaagttggaggctcatcgttcctattcaggcagatgttatcgaggtccgacnnnnnnaacgcaaaacgaaacgccaaaaactaccgatcggatacgcatgaggct

SEQ ID NO: 1360 - DNA, 146 bp, Artificial Sequence
  Bisulfite Padlock Probe
  misc_feature 95, 96, 97, 98, 99, 100: n = A,T,C or G
gactggaagagcactgttaaatccctataaacccaaaatataaaacgttggaggctcatcgttcctattcaggcagatgttatcgaggtccgacnnnnnnaacacccctttaccattaaaaacattgatcggatacgcatgaggct

SEQ ID NO: 1361 - DNA, 146 bp, Artificial Sequence
  Bisulfite Padlock Probe
  misc_feature 95, 96, 97, 98, 99, 100: n = A,T,C or G
gactggaagagcactgttaaatccctataaacccgaaatataaaacgttggaggctcatcgttcctattcaggcagatgttatcgaggtccgacnnnnnnaacacccctttaccattaaaaacattgatcggatacgcatgaggct

SEQ ID NO: 1362 - DNA, 146 bp, Artificial Sequence
  Bisulfite Padlock Probe
  misc_feature 92, 93, 94, 95, 96, 97: n = A,T,C or G
gactggaagagcactgttaaatccgcgcaaaatcaaaatccccgttggaggctcatcgttcctattcaggcagatgttatcgaggtccgacnnnnnncctaaactccaaatcacacctacactcaagatcggatacgcatgaggct

SEQ ID NO: 1363 - DNA, 146 bp, Artificial Sequence
  Bisulfite Padlock Probe
  misc_feature 92, 93, 94, 95, 96, 97: n = A,T,C or G
gactggaagagcactgttaaatccgcgcgaaatcaaaatccccgttggaggctcatcgttcctattcaggcagatgttatcgaggtccgacnnnnnncctaaactccaaatcacacctacactcaagatcggatacgcatgaggct

SEQ ID NO: 1364 - DNA, 146 bp, Artificial Sequence
  Bisulfite Padlock Probe
  misc_feature 94, 95, 96, 97, 98, 99: n = A,T,C or G
gactggaagagcactgttaaatcctatccccaaaatccctttcccgttggaggctcatcgttcctattcaggcagatgttatcgaggtccgacnnnnnnaacaaataaacaaacccaaaacctatcgatcggatacgcatgaggct

SEQ ID NO: 1365 - DNA, 146 bp, Artificial Sequence
  Bisulfite Padlock Probe
  misc_feature 94, 95, 96, 97, 98, 99: n = A,T,C or G
gactggaagagcactgttaaatcctatccccgaaatccctttcccgttggaggctcatcgttcctattcaggcagatgttatcgaggtccgacnnnnnnaacaaataaacaaacccgaaacctatcgatcggatacgcatgaggct

SEQ ID NO: 1366 - DNA, 146 bp, Artificial Sequence
  Bisulfite Padlock Probe
  misc_feature 92, 93, 94, 95, 96, 97: n = A,T,C or G
gactggaagagcactgttaaatcctcacgttcaaactttctctgttggaggctcatcgttcctattcaggcagatgttatcgaggtccgacnnnnnncctccaaacctatcgacctccaaaaacttgatcggatacgcatgaggct

SEQ ID NO: 1367 - DNA, 146 bp, Artificial Sequence
  Bisulfite Padlock Probe
  misc_feature 92, 93, 94, 95, 96, 97: n = A,T,C or G
gactggaagagcactgttaaatcctcacgttcgaactttctctgttggaggctcatcgttcctattcaggcagatgttatcgaggtccgacnnnnnncctccaaacctatcgacctccgaaaacttgatcggatacgcatgaggct

SEQ ID NO: 1368 - DNA, 146 bp, Artificial Sequence
  Bisulfite Padlock Probe
  misc_feature 95, 96, 97, 98, 99, 100: n = A,T,C or G
gactggaagagcactgttaaatcctcgaaactacgcaaactacaacgttggaggctcatcgttcctattcaggcagatgttatcgaggtccgacnnnnnnaccgtctacacacatcccctctaatcgatcggatacgcatgaggct

SEQ ID NO: 1369 - DNA, 146 bp, Artificial Sequence
  Bisulfite Padlock Probe
  misc_feature 95, 96, 97, 98, 99, 100: n = A,T,C or G
gactggaagagcactgttaaatcctcgaaactacgcaaactacgacgttggaggctcatcgttcctattcaggcagatgttatcgaggtccgacnnnnnnaccgtctacacacgtcccctctaatcgatcggatacgcatgaggct

SEQ ID NO: 1370 - DNA, 146 bp, Artificial Sequence
  Bisulfite Padlock Probe
  misc_feature 94, 95, 96, 97, 98, 99: n = A,T,C or G
gactggaagagcactgttaaatcgaaaccgaacctcaacaaaaacgttggaggctcatcgttcctattcaggcagatgttatcgaggtccgacnnnnnntccatctcgaaaacaaaactaaaactagatcggatacgcatgaggct

SEQ ID NO: 1371 - DNA, 146 bp, Artificial Sequence
  Bisulfite Padlock Probe
  misc_feature 94, 95, 96, 97, 98, 99: n = A,T,C or G
gactggaagagcactgttaaatcgaaaccgaacctcaacgaaaacgttggaggctcatcgttcctattcaggcagatgttatcgaggtccgacnnnnnntccatctcgaaaacgaaactaaaactagatcggatacgcatgaggct

SEQ ID NO: 1372 - DNA, 146 bp, Artificial Sequence
  Bisulfite Padlock Probe
  misc_feature 92, 93, 94, 95, 96, 97: n = A,T,C or G
gactggaagagcactgttaaatcgaaactaaaacccaaacactgttggaggctcatcgttcctattcaggcagatgttatcgaggtccgacnnnnnnaaaaccgaaaaacgattcccaactaaatcgatcggatacgcatgaggct

SEQ ID NO: 1373 - DNA, 146 bp, Artificial Sequence
  Bisulfite Padlock Probe
  misc_feature 92, 93, 94, 95, 96, 97: n = A,T,C or G
gactggaagagcactgttaaatcgaaactaaaacccaaacgctgttggaggctcatcgttcctattcaggcagatgttatcgaggtccgacnnnnnnaaaaccgaaaaacgattcccgactaaatcgatcggatacgcatgaggct

SEQ ID NO: 1374 - DNA, 146 bp, Artificial Sequence
  Bisulfite Padlock Probe
  misc_feature 96, 97, 98, 99, 100, 101: n = A,T,C or G
gactggaagagcactgttaaatcgaaataatactcgtcccacaaatcgttggaggctcatcgttcctattcaggcagatgttatcgaggtccgacnnnnnnaaactcgatcccgacacttcactccgatcggatacgcatgaggct

SEQ ID NO: 1375 - DNA, 146 bp, Artificial Sequence
  Bisulfite Padlock Probe
  misc_feature 96, 97, 98, 99, 100, 101: n = A,T,C or G
gactggaagagcactgttaaatcgaaataatactcgtcccgcaaatcgttggaggctcatcgttcctattcaggcagatgttatcgaggtccgacnnnnnnaaactcgatcccgacgcttcactccgatcggatacgcatgaggct

SEQ ID NO: 1376 - DNA, 146 bp, Artificial Sequence
  Bisulfite Padlock Probe
  misc_feature 93, 94, 95, 96, 97, 98: n = A,T,C or G
gactggaagagcactgttaaatcgacgcccaatataaacactacgttggaggctcatcgttcctattcaggcagatgttatcgaggtccgacnnnnnnaaaaataacaaatctcacaacaaattacgatcggatacgcatgaggct

SEQ ID NO: 1377 - DNA, 146 bp, Artificial Sequence
  Bisulfite Padlock Probe
  misc_feature 93, 94, 95, 96, 97, 98: n = A,T,C or G
gactggaagagcactgttaaatcgacgcccgatataaacactacgttggaggctcatcgttcctattcaggcagatgttatcgaggtccgacnnnnnnaaaaataacaaatctcgcaacaaattacgatcggatacgcatgaggct

SEQ ID NO: 1378 - DNA, 146 bp, Artificial Sequence
  Bisulfite Padlock Probe
  misc_feature 93, 94, 95, 96, 97, 98: n = A,T,C or G
gactggaagagcactgttaaatcgactccccgcgaatacaactagttggaggctcatcgttcctattcaggcagatgttatcgaggtccgacnnnnnncgcgcaacactaaccaacactaactactgatcggatacgcatgaggct

SEQ ID NO: 1379 - DNA, 146 bp, Artificial Sequence
  Bisulfite Padlock Probe
  misc_feature 93, 94, 95, 96, 97, 98: n = A,T,C or G
gactggaagagcactgttaaatcgactccccgcgaatacgactagttggaggctcatcgttcctattcaggcagatgttatcgaggtccgacnnnnnncgcgcaacactaaccaacgctaactactgatcggatacgcatgaggct

SEQ ID NO: 1380 - DNA, 146 bp, Artificial Sequence
  Bisulfite Padlock Probe
  misc_feature 92, 93, 94, 95, 96, 97: n = A,T,C or G
gactggaagagcactgttaaatcgctaaacccgctacacgcaagttggaggctcatcgttcctattcaggcagatgttatcgaggtccgacnnnnnnttaaaattcaacgaaaacccgacgacatcgatcggatacgcatgaggct

SEQ ID NO: 1381 - DNA, 146 bp, Artificial Sequence
  Bisulfite Padlock Probe
  misc_feature 92, 93, 94, 95, 96, 97: n = A,T,C or G
gactggaagagcactgttaaatcgctaaacccgctacacgcgagttggaggctcatcgttcctattcaggcagatgttatcgaggtccgacnnnnnnttaaaattcaacgaaaacccgacgacgtcgatcggatacgcatgaggct

SEQ ID NO: 1382 - DNA, 146 bp, Artificial Sequence
  Bisulfite Padlock Probe
  misc_feature 95, 96, 97, 98, 99, 100: n = A,T,C or G
gactggaagagcactgttaaatcgtaaaataaaataaaactaaaacgttggaggctcatcgttcctattcaggcagatgttatcgaggtccgacnnnnnnacttcgaaactaacttaataaaaaccgatcggatacgcatgaggct

SEQ ID NO: 1383 - DNA, 146 bp, Artificial Sequence
  Bisulfite Padlock Probe
  misc_feature 92, 93, 94, 95, 96, 97: n = A,T,C or G
gactggaagagcactgttaaatcgtcctaaaatcaatctaaacgttggaggctcatcgttcctattcaggcagatgttatcgaggtccgacnnnnnncttcacctaaaactcgaaaaccaaaaaccgatcggatacgcatgaggct

SEQ ID NO: 1384 - DNA, 146 bp, Artificial Sequence
  Bisulfite Padlock Probe
  misc_feature 93, 94, 95, 96, 97, 98: n = A,T,C or G
gactggaagagcactgttaaatctaaacccgaaacttcctccacgttggaggctcatcgttcctattcaggcagatgttatcgaggtccgacnnnnnnaaaaacaacccgaaaacaaccaacaccagatcggatacgcatgaggct

SEQ ID NO: 1385 - DNA, 146 bp, Artificial Sequence
  Bisulfite Padlock Probe
  misc_feature 93, 94, 95, 96, 97, 98: n = A,T,C or G
gactggaagagcactgttaaatctaaacccgaaacttcctccgcgttggaggctcatcgttcctattcaggcagatgttatcgaggtccgacnnnnnnaaaaacaacccgaaaacaaccgacaccagatcggatacgcatgaggct

SEQ ID NO: 1386 - DNA, 146 bp, Artificial Sequence
  Bisulfite Padlock Probe
  misc_feature 92, 93, 94, 95, 96, 97: n = A,T,C or G
gactggaagagcactgttaaatctacgcgaccccatctccaaagttggaggctcatcgttcctattcaggcagatgttatcgaggtccgacnnnnnntacctaccctcactaccaccaccaaactcgatcggatacgcatgaggct

SEQ ID NO: 1387 - DNA, 146 bp, Artificial Sequence
  Bisulfite Padlock Probe
  misc_feature 92, 93, 94, 95, 96, 97: n = A,T,C or G
gactggaagagcactgttaaatctacgcgaccccgtctccaaagttggaggctcatcgttcctattcaggcagatgttatcgaggtccgacnnnnnntacctaccctcactaccaccaccaaactcgatcggatacgcatgaggct

SEQ ID NO: 1388 - DNA, 146 bp, Artificial Sequence
  Bisulfite Padlock Probe
  misc_feature 94, 95, 96, 97, 98, 99: n = A,T,C or G
gactggaagagcactgttaaatctacttaaaatttaaccaacaaagttggaggctcatcgttcctattcaggcagatgttatcgaggtccgacnnnnnnaaaaatcctaaacatcttacacttatcgatcggatacgcatgaggct

SEQ ID NO: 1389 - DNA, 146 bp, Artificial Sequence
  Bisulfite Padlock Probe
  misc_feature 94, 95, 96, 97, 98, 99: n = A,T,C or G
gactggaagagcactgttaaatctattactctcactaatacctttgttggaggctcatcgttcctattcaggcagatgttatcgaggtccgacnnnnnncctcctaccttctaacccaacttaaacgatcggatacgcatgaggct

SEQ ID NO: 1390 - DNA, 146 bp, Artificial Sequence
  Bisulfite Padlock Probe
  misc_feature 94, 95, 96, 97, 98, 99: n = A,T,C or G
gactggaagagcactgttaaatctattactctcgctaatacctttgttggaggctcatcgttcctattcaggcagatgttatcgaggtccgacnnnnnncctcctaccttctaacccgacttaaacgatcggatacgcatgaggct

SEQ ID NO: 1391 - DNA, 146 bp, Artificial Sequence
  Bisulfite Padlock Probe
  misc_feature 92, 93, 94, 95, 96, 97: n = A,T,C or G
gactggaagagcactgttaaatctcgaccaccacactaactacgttggaggctcatcgttcctattcaggcagatgttatcgaggtccgacnnnnnnacattaccaaaactaaccaactaaaaaccgatcggatacgcatgaggct

SEQ ID NO: 1392 - DNA, 146 bp, Artificial Sequence
  Bisulfite Padlock Probe
  misc_feature 92, 93, 94, 95, 96, 97: n = A,T,C or G
gactggaagagcactgttaaatctcgaccaccacgctaactacgttggaggctcatcgttcctattcaggcagatgttatcgaggtccgacnnnnnnacattaccgaaactaaccaactaaaaaccgatcggatacgcatgaggct

SEQ ID NO: 1393 - DNA, 146 bp, Artificial Sequence
  Bisulfite Padlock Probe
  misc_feature 96, 97, 98, 99, 100, 101: n = A,T,C or G
gactggaagagcactgttaaattaaaaacatactaaacaaaacaatcgttggaggctcatcgttcctattcaggcagatgttatcgaggtccgacnnnnnnaaactcgaaaaaccatacgcccaacgatcggatacgcatgaggct

SEQ ID NO: 1394 - DNA, 146 bp, Artificial Sequence
  Bisulfite Padlock Probe
  misc_feature 96, 97, 98, 99, 100, 101: n = A,T,C or G
gactggaagagcactgttaaattaaaaacatactaaacaaaacgatcgttggaggctcatcgttcctattcaggcagatgttatcgaggtccgacnnnnnnaaactcgaaaaaccatacgcccgacgatcggatacgcatgaggct

SEQ ID NO: 1395 - DNA, 146 bp, Artificial Sequence
  Bisulfite Padlock Probe
  misc_feature 93, 94, 95, 96, 97, 98: n = A,T,C or G
gactggaagagcactgttaaattcaaataaaactaaaatccaatgttggaggctcatcgttcctattcaggcagatgttatcgaggtccgacnnnnnnaaatcacgaacaaaaaccaaacaaccccgatcggatacgcatgaggct

SEQ ID NO: 1396 - DNA, 146 bp, Artificial Sequence
  Bisulfite Padlock Probe
  misc_feature 92, 93, 94, 95, 96, 97: n = A,T,C or G
gactggaagagcactgttaaattcacgactaaaccaaaaactcgttggaggctcatcgttcctattcaggcagatgttatcgaggtccgacnnnnnnataaaaactaaacctataaaattaaaatcgatcggatacgcatgaggct

SEQ ID NO: 1397 - DNA, 146 bp, Artificial Sequence
  Bisulfite Padlock Probe
  misc_feature 92, 93, 94, 95, 96, 97: n = A,T,C or G
gactggaagagcactgttaaattcacgactaaaccgaaaactcgttggaggctcatcgttcctattcaggcagatgttatcgaggtccgacnnnnnnataaaaactaaacctataaaattaaaatcgatcggatacgcatgaggct

SEQ ID NO: 1398 - DNA, 146 bp, Artificial Sequence
  Bisulfite Padlock Probe
  misc_feature 96, 97, 98, 99, 100, 101: n = A,T,C or G
gactggaagagcactgttaaattccacctaccaaaacaaaactaaacgttggaggctcatcgttcctattcaggcagatgttatcgaggtccgacnnnnnnaaaaacgctccataacatcccactagatcggatacgcatgaggct

SEQ ID NO: 1399 - DNA, 146 bp, Artificial Sequence
  Bisulfite Padlock Probe
  misc_feature 96, 97, 98, 99, 100, 101: n = A,T,C or G
gactggaagagcactgttaaattccacctaccgaaacaaaactaaacgttggaggctcatcgttcctattcaggcagatgttatcgaggtccgacnnnnnnaaaaacgctccataacgtcccactagatcggatacgcatgaggct

SEQ ID NO: 1400 - DNA, 146 bp, Artificial Sequence
  Bisulfite Padlock Probe
  misc_feature 92, 93, 94, 95, 96, 97: n = A,T,C or G
gactggaagagcactgttaaattcctaaaaataaaacaaacacgttggaggctcatcgttcctattcaggcagatgttatcgaggtccgacnnnnnnaaaaactaacacactaaaaactctaaactgatcggatacgcatgaggct

SEQ ID NO: 1401 - DNA, 146 bp, Artificial Sequence
  Bisulfite Padlock Probe
  misc_feature 92, 93, 94, 95, 96, 97: n = A,T,C or G
gactggaagagcactgttaaattcctaaaaataaaacaaacacgttggaggctcatcgttcctattcaggcagatgttatcgaggtccgacnnnnnnaaaaactaacacgctaaaaactctaaactgatcggatacgcatgaggct

SEQ ID NO: 1402 - DNA, 146 bp, Artificial Sequence
  Bisulfite Padlock Probe
  misc_feature 93, 94, 95, 96, 97, 98: n = A,T,C or G
gactggaagagcactgttaaattcgaataaaactaaaatccaatgttggaggctcatcgttcctattcaggcagatgttatcgaggtccgacnnnnnnaaatcacgaacaaaaaccaaacgaccccgatcggatacgcatgaggct

SEQ ID NO: 1403 - DNA, 146 bp, Artificial Sequence
  Bisulfite Padlock Probe
  misc_feature 92, 93, 94, 95, 96, 97: n = A,T,C or G
gactggaagagcactgttaaattctctcctaaactatcaaaaagttggaggctcatcgttcctattcaggcagatgttatcgaggtccgacnnnnnntattcctaaaacactaactaaaatcctacgatcggatacgcatgaggct

SEQ ID NO: 1404 - DNA, 146 bp, Artificial Sequence
  Bisulfite Padlock Probe
  misc_feature 96, 97, 98, 99, 100, 101: n = A,T,C or G
gactggaagagcactgttaaatttaccgcgaccataaattaaaactcgttggaggctcatcgttcctattcaggcagatgttatcgaggtccgacnnnnnnacctttttacaaatcttctcatcccgatcggatacgcatgaggct

SEQ ID NO: 1405 - DNA, 146 bp, Artificial Sequence
  Bisulfite Padlock Probe
  misc_feature 96, 97, 98, 99, 100, 101: n = A,T,C or G
gactggaagagcactgttaaatttaccgcgaccgtaaattaaaactcgttggaggctcatcgttcctattcaggcagatgttatcgaggtccgacnnnnnnacctttttacgaatcttctcatcccgatcggatacgcatgaggct

SEQ ID NO: 1406 - DNA, 146 bp, Artificial Sequence
  Bisulfite Padlock Probe
  misc_feature 95, 96, 97, 98, 99, 100: n = A,T,C or G
gactggaagagcactgttaaatttacgaaaatctctaaccacaaccgttggaggctcatcgttcctattcaggcagatgttatcgaggtccgacnnnnnnaaaaacgaaaacgacgaaatcaactagatcggatacgcatgaggct

SEQ ID NO: 1407 - DNA, 146 bp, Artificial Sequence
  Bisulfite Padlock Probe
  misc_feature 95, 96, 97, 98, 99, 100: n = A,T,C or G
gactggaagagcactgttaaatttacgaaaatctctaaccgcaaccgttggaggctcatcgttcctattcaggcagatgttatcgaggtccgacnnnnnnaaaaacgaaaacgacgaaatcgactagatcggatacgcatgaggct

SEQ ID NO: 1408 - DNA, 146 bp, Artificial Sequence
  Bisulfite Padlock Probe
  misc_feature 96, 97, 98, 99, 100, 101: n = A,T,C or G
gactggaagagcactgttaaatttataaataaaatataattcccactgttggaggctcatcgttcctattcaggcagatgttatcgaggtccgacnnnnnnaaacactaaaaacaacatctcctccgatcggatacgcatgaggct

SEQ ID NO: 1409 - DNA, 146 bp, Artificial Sequence
  Bisulfite Padlock Probe
  misc_feature 96, 97, 98, 99, 100, 101: n = A,T,C or G
gactggaagagcactgttaaatttctctccaaaatctaaacacaactgttggaggctcatcgttcctattcaggcagatgttatcgaggtccgacnnnnnnatccccaaaaacccaaacacccctcgatcggatacgcatgaggct

SEQ ID NO: 1410 - DNA, 146 bp, Artificial Sequence
  Bisulfite Padlock Probe
  misc_feature 96, 97, 98, 99, 100, 101: n = A,T,C or G
gactggaagagcactgttaaatttctctccgaaatctaaacacaactgttggaggctcatcgttcctattcaggcagatgttatcgaggtccgacnnnnnnatccccaaaaacccaaacacccctcgatcggatacgcatgaggct

SEQ ID NO: 1411 - DNA, 146 bp, Artificial Sequence
  Bisulfite Padlock Probe
  misc_feature 95, 96, 97, 98, 99, 100: n = A,T,C or G
gactggaagagcactgttaaatttcttaaactttcaaactaaacccgttggaggctcatcgttcctattcaggcagatgttatcgaggtccgacnnnnnncaccgaaaacaaaaacgtcaaaactagatcggatacgcatgaggct

SEQ ID NO: 1412 - DNA, 146 bp, Artificial Sequence
  Bisulfite Padlock Probe
  misc_feature 95, 96, 97, 98, 99, 100: n = A,T,C or G
gactggaagagcactgttaaatttcttaaactttcgaactaaacccgttggaggctcatcgttcctattcaggcagatgttatcgaggtccgacnnnnnncaccgaaaacaaaaacgtcgaaactagatcggatacgcatgaggct

SEQ ID NO: 1413 - DNA, 146 bp, Artificial Sequence
  Bisulfite Padlock Probe
  misc_feature 93, 94, 95, 96, 97, 98: n = A,T,C or G
gactggaagagcactgttaacaaaaaacctaaaattcttaaaaagttggaggctcatcgttcctattcaggcagatgttatcgaggtccgacnnnnnnacccgctctatattcatcttaacctctcgatcggatacgcatgaggct

SEQ ID NO: 1414 - DNA, 146 bp, Artificial Sequence
  Bisulfite Padlock Probe
  misc_feature 96, 97, 98, 99, 100, 101: n = A,T,C or G
gactggaagagcactgttaacaaaaaataaacttccataaaaactaagttggaggctcatcgttcctattcaggcagatgttatcgaggtccgacnnnnnnacctcttcaccaaacaaatacaaaagatcggatacgcatgaggct

SEQ ID NO: 1415 - DNA, 146 bp, Artificial Sequence
  Bisulfite Padlock Probe
  misc_feature 92, 93, 94, 95, 96, 97: n = A,T,C or G
gactggaagagcactgttaacaaaaacaaaacactaccaaaaagttggaggctcatcgttcctattcaggcagatgttatcgaggtccgacnnnnnnaatccaaaatcctaaaccctcaattttaagatcggatacgcatgaggct

SEQ ID NO: 1416 - DNA, 146 bp, Artificial Sequence
  Bisulfite Padlock Probe
  misc_feature 92, 93, 94, 95, 96, 97: n = A,T,C or G
gactggaagagcactgttaacaaaaacaaaacactaccaaaaagttggaggctcatcgttcctattcaggcagatgttatcgaggtccgacnnnnnnaatccgaaatcctaaaccctcaattttaagatcggatacgcatgaggct

SEQ ID NO: 1417 - DNA, 146 bp, Artificial Sequence
  Bisulfite Padlock Probe
  misc_feature 94, 95, 96, 97, 98, 99: n = A,T,C or G
gactggaagagcactgttaacaaaaacaataactctacaaaactcgttggaggctcatcgttcctattcaggcagatgttatcgaggtccgacnnnnnnattaaattaatcaatcataaattacacgatcggatacgcatgaggct

SEQ ID NO: 1418 - DNA, 146 bp, Artificial Sequence
  Bisulfite Padlock Probe
  misc_feature 94, 95, 96, 97, 98, 99: n = A,T,C or G
gactggaagagcactgttaacaaaaacaataactctacgaaactcgttggaggctcatcgttcctattcaggcagatgttatcgaggtccgacnnnnnnattaaattaatcgatcataaattacacgatcggatacgcatgaggct

SEQ ID NO: 1419 - DNA, 146 bp, Artificial Sequence
  Bisulfite Padlock Probe
  misc_feature 95, 96, 97, 98, 99, 100: n = A,T,C or G
gactggaagagcactgttaacaaaaactaaaccgcaaatccccaccgttggaggctcatcgttcctattcaggcagatgttatcgaggtccgacnnnnnnctaaacgcccactcgccctacaaaaagatcggatacgcatgaggct

SEQ ID NO: 1420 - DNA, 146 bp, Artificial Sequence
  Bisulfite Padlock Probe
  misc_feature 95, 96, 97, 98, 99, 100: n = A,T,C or G
gactggaagagcactgttaacaaaaactaaaccgcgaatccccaccgttggaggctcatcgttcctattcaggcagatgttatcgaggtccgacnnnnnnctaaacgcccactcgccctacgaaaagatcggatacgcatgaggct

SEQ ID NO: 1421 - DNA, 146 bp, Artificial Sequence
  Bisulfite Padlock Probe
  misc_feature 92, 93, 94, 95, 96, 97: n = A,T,C or G
gactggaagagcactgttaacaaaaactacaaataactcccacgttggaggctcatcgttcctattcaggcagatgttatcgaggtccgacnnnnnnaaatcctaacaactacatcctatatactcgatcggatacgcatgaggct

SEQ ID NO: 1422 - DNA, 146 bp, Artificial Sequence
  Bisulfite Padlock Probe
  misc_feature 92, 93, 94, 95, 96, 97: n = A,T,C or G
gactggaagagcactgttaacaaaaactacaaataactcccacgttggaggctcatcgttcctattcaggcagatgttatcgaggtccgacnnnnnnaaatcctaacgactacatcctatatactcgatcggatacgcatgaggct

SEQ ID NO: 1423 - DNA, 146 bp, Artificial Sequence
  Bisulfite Padlock Probe
  misc_feature 95, 96, 97, 98, 99, 100: n = A,T,C or G
gactggaagagcactgttaacaaaacaaaacattaactaaacaatcgttggaggctcatcgttcctattcaggcagatgttatcgaggtccgacnnnnnntccctacactacctcctaaaaccctcgatcggatacgcatgaggct

SEQ ID NO: 1424 - DNA, 146 bp, Artificial Sequence
  Bisulfite Padlock Probe
  misc_feature 95, 96, 97, 98, 99, 100: n = A,T,C or G
gactggaagagcactgttaacaaaacaaaacgttaactaaacaatcgttggaggctcatcgttcctattcaggcagatgttatcgaggtccgacnnnnnntccctacgctacctcctaaaaccctcgatcggatacgcatgaggct

SEQ ID NO: 1425 - DNA, 146 bp, Artificial Sequence
  Bisulfite Padlock Probe
  misc_feature 94, 95, 96, 97, 98, 99: n = A,T,C or G
gactggaagagcactgttaacaaaacaaacgaaacgactccaaacgttggaggctcatcgttcctattcaggcagatgttatcgaggtccgacnnnnnnaaaacgaacgcgaccgaacaaaaatccgatcggatacgcatgaggct

SEQ ID NO: 1426 - DNA, 146 bp, Artificial Sequence
  Bisulfite Padlock Probe
  misc_feature 94, 95, 96, 97, 98, 99: n = A,T,C or G
gactggaagagcactgttaacaaaacaaacgaaacgactccgaacgttggaggctcatcgttcctattcaggcagatgttatcgaggtccgacnnnnnnaaaacgaacgcgaccgaacgaaaatccgatcggatacgcatgaggct

SEQ ID NO: 1427 - DNA, 146 bp, Artificial Sequence
  Bisulfite Padlock Probe
  misc_feature 93, 94, 95, 96, 97, 98: n = A,T,C or G
gactggaagagcactgttaacaaacaaataacaatcccctaaccgttggaggctcatcgttcctattcaggcagatgttatcgaggtccgacnnnnnnccgaaaacgttcgccctaaaatcaaaccgatcggatacgcatgaggct

SEQ ID NO: 1428 - DNA, 146 bp, Artificial Sequence
  Bisulfite Padlock Probe
  misc_feature 93, 94, 95, 96, 97, 98: n = A,T,C or G
gactggaagagcactgttaacaaacaaataacaatcccctaaccgttggaggctcatcgttcctattcaggcagatgttatcgaggtccgacnnnnnnccgaaaacgttcgccctaaaatcgaaccgatcggatacgcatgaggct

SEQ ID NO: 1429 - DNA, 146 bp, Artificial Sequence
  Bisulfite Padlock Probe
  misc_feature 92, 93, 94, 95, 96, 97: n = A,T,C or G
gactggaagagcactgttaacaaaccctcgacactcactaaacgttggaggctcatcgttcctattcaggcagatgttatcgaggtccgacnnnnnnccctatctaacaccttaactctcaaactagatcggatacgcatgaggct

SEQ ID NO: 1430 - DNA, 146 bp, Artificial Sequence
  Bisulfite Padlock Probe
  misc_feature 92, 93, 94, 95, 96, 97: n = A,T,C or G
gactggaagagcactgttaacaaaccctcgacgctcactaaacgttggaggctcatcgttcctattcaggcagatgttatcgaggtccgacnnnnnnccctatctaacaccttaactctcaaactagatcggatacgcatgaggct

SEQ ID NO: 1431 - DNA, 146 bp, Artificial Sequence
  Bisulfite Padlock Probe
  misc_feature 93, 94, 95, 96, 97, 98: n = A,T,C or G
gactggaagagcactgttaacaaacgataacgcgcataaaacacgttggaggctcatcgttcctattcaggcagatgttatcgaggtccgacnnnnnncctctcgataaacctatacaacctcaacgatcggatacgcatgaggct

SEQ ID NO: 1432 - DNA, 146 bp, Artificial Sequence
  Bisulfite Padlock Probe
  misc_feature 93, 94, 95, 96, 97, 98: n = A,T,C or G
gactggaagagcactgttaacaaacgataacgcgcgtaaaacacgttggaggctcatcgttcctattcaggcagatgttatcgaggtccgacnnnnnncctctcgataaacctatacgacctcaacgatcggatacgcatgaggct

SEQ ID NO: 1433 - DNA, 146 bp, Artificial Sequence
  Bisulfite Padlock Probe
  misc_feature 92, 93, 94, 95, 96, 97: n = A,T,C or G
gactggaagagcactgttaacaaacgcctttattccactcaccgttggaggctcatcgttcctattcaggcagatgttatcgaggtccgacnnnnnncaaacgaaactacccaaaaaacacaaaaagatcggatacgcatgaggct

SEQ ID NO: 1434 - DNA, 146 bp, Artificial Sequence
  Bisulfite Padlock Probe
  misc_feature 92, 93, 94, 95, 96, 97: n = A,T,C or G
gactggaagagcactgttaacaaacgcctttattccgctcaccgttggaggctcatcgttcctattcaggcagatgttatcgaggtccgacnnnnnncaaacgaaactacccgaaaaacacaaaaagatcggatacgcatgaggct

SEQ ID NO: 1435 - DNA, 146 bp, Artificial Sequence
  Bisulfite Padlock Probe
  misc_feature 95, 96, 97, 98, 99, 100: n = A,T,C or G
gactggaagagcactgttaacaaactaaatcttcccacctaccatcgttggaggctcatcgttcctattcaggcagatgttatcgaggtccgacnnnnnnctaaaccgcaacacctaaacaaatacgatcggatacgcatgaggct

SEQ ID NO: 1436 - DNA, 146 bp, Artificial Sequence
  Bisulfite Padlock Probe
  misc_feature 95, 96, 97, 98, 99, 100: n = A,T,C or G
gactggaagagcactgttaacaaactaaatcttcccacctaccgtcgttggaggctcatcgttcctattcaggcagatgttatcgaggtccgacnnnnnnctaaaccgcaacgcctaaacaaatacgatcggatacgcatgaggct

SEQ ID NO: 1437 - DNA, 146 bp, Artificial Sequence
  Bisulfite Padlock Probe
  misc_feature 92, 93, 94, 95, 96, 97: n = A,T,C or G
gactggaagagcactgttaacaaactaaccaaatctctaaaacgttggaggctcatcgttcctattcaggcagatgttatcgaggtccgacnnnnnnaacaccaaccgactatacactccctactcgatcggatacgcatgaggct

SEQ ID NO: 1438 - DNA, 146 bp, Artificial Sequence
  Bisulfite Padlock Probe
  misc_feature 92, 93, 94, 95, 96, 97: n = A,T,C or G
gactggaagagcactgttaacaaactaaccgaatctctaaaacgttggaggctcatcgttcctattcaggcagatgttatcgaggtccgacnnnnnnaacaccaaccgactatacgctccctactcgatcggatacgcatgaggct

SEQ ID NO: 1439 - DNA, 146 bp, Artificial Sequence
  Bisulfite Padlock Probe
  misc_feature 92, 93, 94, 95, 96, 97: n = A,T,C or G
gactggaagagcactgttaacaaatctatttatctacccacatgttggaggctcatcgttcctattcaggcagatgttatcgaggtccgacnnnnnnttctaaacgccaaccatttacaaactaaagatcggatacgcatgaggct

SEQ ID NO: 1440 - DNA, 146 bp, Artificial Sequence
  Bisulfite Padlock Probe
  misc_feature 92, 93, 94, 95, 96, 97: n = A,T,C or G
gactggaagagcactgttaacaaatctatttatctacccacatgttggaggctcatcgttcctattcaggcagatgttatcgaggtccgacnnnnnnttctaaacgccgaccatttacaaactaaagatcggatacgcatgaggct

SEQ ID NO: 1441 - DNA, 146 bp, Artificial Sequence
  Bisulfite Padlock Probe
  misc_feature 94, 95, 96, 97, 98, 99: n = A,T,C or G
gactggaagagcactgttaacaaatctccaaacaaacaccaatccgttggaggctcatcgttcctattcaggcagatgttatcgaggtccgacnnnnnnctttctcttacgcaaactaacaactacgatcggatacgcatgaggct

SEQ ID NO: 1442 - DNA, 146 bp, Artificial Sequence
  Bisulfite Padlock Probe
  misc_feature 94, 95, 96, 97, 98, 99: n = A,T,C or G
gactggaagagcactgttaacaaatctccaaacaaacgccaatccgttggaggctcatcgttcctattcaggcagatgttatcgaggtccgacnnnnnnctttctcttacgcaaactaacgactacgatcggatacgcatgaggct

SEQ ID NO: 1443 - DNA, 146 bp, Artificial Sequence
  Bisulfite Padlock Probe
  misc_feature 93, 94, 95, 96, 97, 98: n = A,T,C or G
gactggaagagcactgttaacaacaaatatcccccacccccaacgttggaggctcatcgttcctattcaggcagatgttatcgaggtccgacnnnnnntacaacaacaactccaaatcccctaaccgatcggatacgcatgaggct

SEQ ID NO: 1444 - DNA, 146 bp, Artificial Sequence
  Bisulfite Padlock Probe
  misc_feature 96, 97, 98, 99, 100, 101: n = A,T,C or G
gactggaagagcactgttaacaacaacaacaaactaacaaacaaaacgttggaggctcatcgttcctattcaggcagatgttatcgaggtccgacnnnnnnaccaaaaatctccgcgcccaaaaaagatcggatacgcatgaggct

SEQ ID NO: 1445 - DNA, 146 bp, Artificial Sequence
  Bisulfite Padlock Probe
  misc_feature 96, 97, 98, 99, 100, 101: n = A,T,C or G
gactggaagagcactgttaacaacaacaacaaactaacgaacaaaacgttggaggctcatcgttcctattcaggcagatgttatcgaggtccgacnnnnnnaccaaaaatctccgcgcccgaaaaagatcggatacgcatgaggct

SEQ ID NO: 1446 - DNA, 146 bp, Artificial Sequence
  Bisulfite Padlock Probe
  misc_feature 95, 96, 97, 98, 99, 100: n = A,T,C or G
gactggaagagcactgttaacaacaacgaacgaaaacgcaaaaaccgttggaggctcatcgttcctattcaggcagatgttatcgaggtccgacnnnnnnaaaaactatcgcttacgcccgaacacgatcggatacgcatgaggct

SEQ ID NO: 1447 - DNA, 146 bp, Artificial Sequence
  Bisulfite Padlock Probe
  misc_feature 95, 96, 97, 98, 99, 100: n = A,T,C or G
gactggaagagcactgttaacaacaacgaacgaaaacgcgaaaaccgttggaggctcatcgttcctattcaggcagatgttatcgaggtccgacnnnnnnaaaaactatcgcttacgcccgaacgcgatcggatacgcatgaggct

SEQ ID NO: 1448 - DNA, 146 bp, Artificial Sequence
  Bisulfite Padlock Probe
  misc_feature 95, 96, 97, 98, 99, 100: n = A,T,C or G
gactggaagagcactgttaacaacaactaatccaaactaataaaaagttggaggctcatcgttcctattcaggcagatgttatcgaggtccgacnnnnnntcaaaacgcgcacatactcctaactcgatcggatacgcatgaggct

SEQ ID NO: 1449 - DNA, 146 bp, Artificial Sequence
  Bisulfite Padlock Probe
  misc_feature 95, 96, 97, 98, 99, 100: n = A,T,C or G
gactggaagagcactgttaacaacaactaatccgaactaataaaaagttggaggctcatcgttcctattcaggcagatgttatcgaggtccgacnnnnnntcaaaacgcgcgcatactcctaactcgatcggatacgcatgaggct

SEQ ID NO: 1450 - DNA, 146 bp, Artificial Sequence
  Bisulfite Padlock Probe
  misc_feature 93, 94, 95, 96, 97, 98: n = A,T,C or G
gactggaagagcactgttaacaacaactcgaaatcgacattaacgttggaggctcatcgttcctattcaggcagatgttatcgaggtccgacnnnnnnctcgaaaaacgcgaaacgcaacaaaaaagatcggatacgcatgaggct

SEQ ID NO: 1451 - DNA, 146 bp, Artificial Sequence
  Bisulfite Padlock Probe
  misc_feature 93, 94, 95, 96, 97, 98: n = A,T,C or G
gactggaagagcactgttaacaacaactcgaaatcgacgttaacgttggaggctcatcgttcctattcaggcagatgttatcgaggtccgacnnnnnnctcgaaaaacgcgaaacgcaacgaaaaagatcggatacgcatgaggct

SEQ ID NO: 1452 - DNA, 146 bp, Artificial Sequence
  Bisulfite Padlock Probe
  misc_feature 93, 94, 95, 96, 97, 98: n = A,T,C or G
gactggaagagcactgttaacaacaccctataaactaaactaacgttggaggctcatcgttcctattcaggcagatgttatcgaggtccgacnnnnnncttaacccattctcataaaactataaccgatcggatacgcatgaggct

SEQ ID NO: 1453 - DNA, 146 bp, Artificial Sequence
  Bisulfite Padlock Probe
  misc_feature 93, 94, 95, 96, 97, 98: n = A,T,C or G
gactggaagagcactgttaacaacaccctataaactaaactaacgttggaggctcatcgttcctattcaggcagatgttatcgaggtccgacnnnnnncttaacccgttctcataaaactataaccgatcggatacgcatgaggct

SEQ ID NO: 1454 - DNA, 146 bp, Artificial Sequence
  Bisulfite Padlock Probe
  misc_feature 92, 93, 94, 95, 96, 97: n = A,T,C or G
gactggaagagcactgttaacaacacgaaatccaacaaatttcgttggaggctcatcgttcctattcaggcagatgttatcgaggtccgacnnnnnnctaataaccgtcaccgaccaatactaaaagatcggatacgcatgaggct

SEQ ID NO: 1455 - DNA, 146 bp, Artificial Sequence
  Bisulfite Padlock Probe
  misc_feature 92, 93, 94, 95, 96, 97: n = A,T,C or G
gactggaagagcactgttaacaacacgaaatccgacaaatttcgttggaggctcatcgttcctattcaggcagatgttatcgaggtccgacnnnnnnctaataaccgtcaccgaccgatactaaaagatcggatacgcatgaggct

SEQ ID NO: 1456 - DNA, 146 bp, Artificial Sequence
  Bisulfite Padlock Probe
  misc_feature 94, 95, 96, 97, 98, 99: n = A,T,C or G
gactggaagagcactgttaacaaccacccaccaacaaaccctaacgttggaggctcatcgttcctattcaggcagatgttatcgaggtccgacnnnnnntaaaccaataaaccataccttctccccgatcggatacgcatgaggct

SEQ ID NO: 1457 - DNA, 146 bp, Artificial Sequence
  Bisulfite Padlock Probe
  misc_feature 96, 97, 98, 99, 100, 101: n = A,T,C or G
gactggaagagcactgttaacaacccgcactcaacaactactaaaaagttggaggctcatcgttcctattcaggcagatgttatcgaggtccgacnnnnnnaaaacgtcaccctaatccccaaaaagatcggatacgcatgaggct

SEQ ID NO: 1458 - DNA, 146 bp, Artificial Sequence
  Bisulfite Padlock Probe
  misc_feature 96, 97, 98, 99, 100, 101: n = A,T,C or G
gactggaagagcactgttaacaacccgcactcgacaactactaaaaagttggaggctcatcgttcctattcaggcagatgttatcgaggtccgacnnnnnnaaaacgtcgccctaatccccaaaaagatcggatacgcatgaggct

SEQ ID NO: 1459 - DNA, 146 bp, Artificial Sequence
  Bisulfite Padlock Probe
  misc_feature 96, 97, 98, 99, 100, 101: n = A,T,C or G
gactggaagagcactgttaacaaccgacctcaaaacccctcaaaaaagttggaggctcatcgttcctattcaggcagatgttatcgaggtccgacnnnnnntactacttcataaacaaccactatcgatcggatacgcatgaggct

SEQ ID NO: 1460 - DNA, 146 bp, Artificial Sequence
  Bisulfite Padlock Probe
  misc_feature 96, 97, 98, 99, 100, 101: n = A,T,C or G
gactggaagagcactgttaacaaccgacctcaaaacccctcgaaaaagttggaggctcatcgttcctattcaggcagatgttatcgaggtccgacnnnnnntactacttcataaacgaccactatcgatcggatacgcatgaggct

SEQ ID NO: 1461 - DNA, 146 bp, Artificial Sequence
  Bisulfite Padlock Probe
  misc_feature 93, 94, 95, 96, 97, 98: n = A,T,C or G
gactggaagagcactgttaacaacctaaaataactctatactacgttggaggctcatcgttcctattcaggcagatgttatcgaggtccgacnnnnnntactatcaataaataaaaaccaaaaacagatcggatacgcatgaggct

SEQ ID NO: 1462 - DNA, 146 bp, Artificial Sequence
  Bisulfite Padlock Probe
  misc_feature 93, 94, 95, 96, 97, 98: n = A,T,C or G
gactggaagagcactgttaacaacctaaaataactctatactacgttggaggctcatcgttcctattcaggcagatgttatcgaggtccgacnnnnnntactatcaataaataaaaaccgaaaacagatcggatacgcatgaggct

SEQ ID NO: 1463 - DNA, 146 bp, Artificial Sequence
  Bisulfite Padlock Probe
  misc_feature 93, 94, 95, 96, 97, 98: n = A,T,C or G
gactggaagagcactgttaacaacctaacaaaacaattctctccgttggaggctcatcgttcctattcaggcagatgttatcgaggtccgacnnnnnntcttccaaaacacctaaacataaacaacgatcggatacgcatgaggct

SEQ ID NO: 1464 - DNA, 146 bp, Artificial Sequence
  Bisulfite Padlock Probe
  misc_feature 93, 94, 95, 96, 97, 98: n = A,T,C or G
gactggaagagcactgttaacaacctaacaaaacaattctctccgttggaggctcatcgttcctattcaggcagatgttatcgaggtccgacnnnnnntcttccgaaacacctaaacataaacaacgatcggatacgcatgaggct

SEQ ID NO: 1465 - DNA, 146 bp, Artificial Sequence
  Bisulfite Padlock Probe
  misc_feature 96, 97, 98, 99, 100, 101: n = A,T,C or G
gactggaagagcactgttaacaacctaataaaaacaaaaaataaaacgttggaggctcatcgttcctattcaggcagatgttatcgaggtccgacnnnnnntacaactcctaaacgcaccaaactcgatcggatacgcatgaggct

SEQ ID NO: 1466 - DNA, 146 bp, Artificial Sequence
  Bisulfite Padlock Probe
  misc_feature 96, 97, 98, 99, 100, 101: n = A,T,C or G
gactggaagagcactgttaacaacctaataaaaacgaaaaataaaacgttggaggctcatcgttcctattcaggcagatgttatcgaggtccgacnnnnnntacaactcctaaacgcgccaaactcgatcggatacgcatgaggct

SEQ ID NO: 1467 - DNA, 146 bp, Artificial Sequence
  Bisulfite Padlock Probe
  misc_feature 92, 93, 94, 95, 96, 97: n = A,T,C or G
gactggaagagcactgttaacaacctcttatcccatatcctacgttggaggctcatcgttcctattcaggcagatgttatcgaggtccgacnnnnnntacaacgactacaaaactaaataaaaaccgatcggatacgcatgaggct

SEQ ID NO: 1468 - DNA, 146 bp, Artificial Sequence
  Bisulfite Padlock Probe
  misc_feature 92, 93, 94, 95, 96, 97: n = A,T,C or G
gactggaagagcactgttaacaacctcttatcccatatcctacgttggaggctcatcgttcctattcaggcagatgttatcgaggtccgacnnnnnntacaacgactacgaaactaaataaaaaccgatcggatacgcatgaggct

SEQ ID NO: 1469 - DNA, 146 bp, Artificial Sequence
  Bisulfite Padlock Probe
  misc_feature 96, 97, 98, 99, 100, 101: n = A,T,C or G
gactggaagagcactgttaacaacctcttctctaacacacaaaaaccgttggaggctcatcgttcctattcaggcagatgttatcgaggtccgacnnnnnntaatcaattcaccaaatacctactcgatcggatacgcatgaggct

SEQ ID NO: 1470 - DNA, 146 bp, Artificial Sequence
  Bisulfite Padlock Probe
  misc_feature 96, 97, 98, 99, 100, 101: n = A,T,C or G
gactggaagagcactgttaacaacctcttctctaacacgcaaaaaccgttggaggctcatcgttcctattcaggcagatgttatcgaggtccgacnnnnnntaatcaattcaccaaatacctactcgatcggatacgcatgaggct

SEQ ID NO: 1471 - DNA, 146 bp, Artificial Sequence
  Bisulfite Padlock Probe
  misc_feature 93, 94, 95, 96, 97, 98: n = A,T,C or G
gactggaagagcactgttaacaacgaatatcccccacccccaacgttggaggctcatcgttcctattcaggcagatgttatcgaggtccgacnnnnnntacaacaacgactccaaatcccctaaccgatcggatacgcatgaggct

SEQ ID NO: 1472 - DNA, 146 bp, Artificial Sequence
  Bisulfite Padlock Probe
  misc_feature 93, 94, 95, 96, 97, 98: n = A,T,C or G
gactggaagagcactgttaacaacgacaaacaaataaaataatcgttggaggctcatcgttcctattcaggcagatgttatcgaggtccgacnnnnnnaacttcgaacaaattcgacaacaaaaacgatcggatacgcatgaggct

SEQ ID NO: 1473 - DNA, 146 bp, Artificial Sequence
  Bisulfite Padlock Probe
  misc_feature 93, 94, 95, 96, 97, 98: n = A,T,C or G
gactggaagagcactgttaacaacgacaaacgaataaaataatcgttggaggctcatcgttcctattcaggcagatgttatcgaggtccgacnnnnnnaacttcgaacaaattcgacgacaaaaacgatcggatacgcatgaggct

SEQ ID NO: 1474 - DNA, 146 bp, Artificial Sequence
  Bisulfite Padlock Probe
  misc_feature 93, 94, 95, 96, 97, 98: n = A,T,C or G
gactggaagagcactgttaacaacgcacccaacaacaaactcaagttggaggctcatcgttcctattcaggcagatgttatcgaggtccgacnnnnnnaaacgcccttctaaattaaaaacaactcgatcggatacgcatgaggct

SEQ ID NO: 1475 - DNA, 146 bp, Artificial Sequence
  Bisulfite Padlock Probe
  misc_feature 94, 95, 96, 97, 98, 99: n = A,T,C or G
gactggaagagcactgttaacaacgccgaaactaaaaacaaaaaagttggaggctcatcgttcctattcaggcagatgttatcgaggtccgacnnnnnnctcgcccaactccctactacctaaaccgatcggatacgcatgaggct

SEQ ID NO: 1476 - DNA, 146 bp, Artificial Sequence
  Bisulfite Padlock Probe
  misc_feature 94, 95, 96, 97, 98, 99: n = A,T,C or G
gactggaagagcactgttaacaacgccgaaactaaaaacgaaaaagttggaggctcatcgttcctattcaggcagatgttatcgaggtccgacnnnnnnctcgcccgactccctactacctaaaccgatcggatacgcatgaggct

SEQ ID NO: 1477 - DNA, 146 bp, Artificial Sequence
  Bisulfite Padlock Probe
  misc_feature 93, 94, 95, 96, 97, 98: n = A,T,C or G
gactggaagagcactgttaacaacgcgcccaacaacaaactcaagttggaggctcatcgttcctattcaggcagatgttatcgaggtccgacnnnnnnaaacgcccttctaaattaaaaacgactcgatcggatacgcatgaggct

SEQ ID NO: 1478 - DNA, 146 bp, Artificial Sequence
  Bisulfite Padlock Probe
  misc_feature 92, 93, 94, 95, 96, 97: n = A,T,C or G
gactggaagagcactgttaacaataaaaccaaataaaaccaccgttggaggctcatcgttcctattcaggcagatgttatcgaggtccgacnnnnnnacaataacacccctccccctctaaaaacagatcggatacgcatgaggct

SEQ ID NO: 1479 - DNA, 146 bp, Artificial Sequence
  Bisulfite Padlock Probe
  misc_feature 92, 93, 94, 95, 96, 97: n = A,T,C or G
gactggaagagcactgttaacaataaaaccaaataaaaccgccgttggaggctcatcgttcctattcaggcagatgttatcgaggtccgacnnnnnnacaataacacccctccccctctaaaaacagatcggatacgcatgaggct

SEQ ID NO: 1480 - DNA, 146 bp, Artificial Sequence
  Bisulfite Padlock Probe
  misc_feature 92, 93, 94, 95, 96, 97: n = A,T,C or G
gactggaagagcactgttaacaatataaaactctttctaaaccgttggaggctcatcgttcctattcaggcagatgttatcgaggtccgacnnnnnnatatccctaaatccctaaacaaaaatatcgatcggatacgcatgaggct

SEQ ID NO: 1481 - DNA, 146 bp, Artificial Sequence
  Bisulfite Padlock Probe
  misc_feature 94, 95, 96, 97, 98, 99: n = A,T,C or G
gactggaagagcactgttaacaatattaccccctcaaaaattaacgttggaggctcatcgttcctattcaggcagatgttatcgaggtccgacnnnnnnaaaaacaaaatacaaccctactaaaacgatcggatacgcatgaggct

SEQ ID NO: 1482 - DNA, 146 bp, Artificial Sequence
  Bisulfite Padlock Probe
  misc_feature 93, 94, 95, 96, 97, 98: n = A,T,C or G
gactggaagagcactgttaacaattcatcatcttaatccataacgttggaggctcatcgttcctattcaggcagatgttatcgaggtccgacnnnnnnaatctcaatccccatcctaaacccactcgatcggatacgcatgaggct

SEQ ID NO: 1483 - DNA, 146 bp, Artificial Sequence
  Bisulfite Padlock Probe
  misc_feature 92, 93, 94, 95, 96, 97: n = A,T,C or G
gactggaagagcactgttaacacaaaatccttacaactaaaaagttggaggctcatcgttcctattcaggcagatgttatcgaggtccgacnnnnnncgaaaaataacccctaacacccccaatacgatcggatacgcatgaggct

SEQ ID NO: 1484 - DNA, 146 bp, Artificial Sequence
  Bisulfite Padlock Probe
  misc_feature 93, 94, 95, 96, 97, 98: n = A,T,C or G
gactggaagagcactgttaacacaaactatccctaaaatccccagttggaggctcatcgttcctattcaggcagatgttatcgaggtccgacnnnnnnccaccgaaactaaacgcataacccctaagatcggatacgcatgaggct

SEQ ID NO: 1485 - DNA, 146 bp, Artificial Sequence
  Bisulfite Padlock Probe
  misc_feature 93, 94, 95, 96, 97, 98: n = A,T,C or G
gactggaagagcactgttaacacaaactatccctaaaatccccagttggaggctcatcgttcctattcaggcagatgttatcgaggtccgacnnnnnnccaccgaaactaaacgcgtaacccctaagatcggatacgcatgaggct

SEQ ID NO: 1486 - DNA, 146 bp, Artificial Sequence
  Bisulfite Padlock Probe
  misc_feature 92, 93, 94, 95, 96, 97: n = A,T,C or G
gactggaagagcactgttaacacaaatcaaccctaaaattttcgttggaggctcatcgttcctattcaggcagatgttatcgaggtccgacnnnnnnaaaactctaaaccaataacaattaactaagatcggatacgcatgaggct

SEQ ID NO: 1487 - DNA, 146 bp, Artificial Sequence
  Bisulfite Padlock Probe
  misc_feature 92, 93, 94, 95, 96, 97: n = A,T,C or G
gactggaagagcactgttaacacaaatcaaccctaaaattttcgttggaggctcatcgttcctattcaggcagatgttatcgaggtccgacnnnnnnaaaactctaaaccaataacgattaactaagatcggatacgcatgaggct

SEQ ID NO: 1488 - DNA, 146 bp, Artificial Sequence
  Bisulfite Padlock Probe
  misc_feature 94, 95, 96, 97, 98, 99: n = A,T,C or G
gactggaagagcactgttaacacaataaccctaacccaaaaaaccgttggaggctcatcgttcctattcaggcagatgttatcgaggtccgacnnnnnnaaaactactaccgcacctcctaaactcgatcggatacgcatgaggct

SEQ ID NO: 1489 - DNA, 146 bp, Artificial Sequence
  Bisulfite Padlock Probe
  misc_feature 94, 95, 96, 97, 98, 99: n = A,T,C or G
gactggaagagcactgttaacacaataaccctaacccgaaaaaccgttggaggctcatcgttcctattcaggcagatgttatcgaggtccgacnnnnnnaaaactactaccgcgcctcctaaactcgatcggatacgcatgaggct

SEQ ID NO: 1490 - DNA, 146 bp, Artificial Sequence
  Bisulfite Padlock Probe
  misc_feature 92, 93, 94, 95, 96, 97: n = A,T,C or G
gactggaagagcactgttaacacaccaaacactcaacaacctcgttggaggctcatcgttcctattcaggcagatgttatcgaggtccgacnnnnnnctaacacctaatacacttcttcatcctacgatcggatacgcatgaggct

SEQ ID NO: 1491 - DNA, 146 bp, Artificial Sequence
  Bisulfite Padlock Probe
  misc_feature 92, 93, 94, 95, 96, 97: n = A,T,C or G
gactggaagagcactgttaacacaccaaacactcaacgacctcgttggaggctcatcgttcctattcaggcagatgttatcgaggtccgacnnnnnnctaacacctaatacacttcttcatcctacgatcggatacgcatgaggct

SEQ ID NO: 1492 - DNA, 146 bp, Artificial Sequence
  Bisulfite Padlock Probe
  misc_feature 96, 97, 98, 99, 100, 101: n = A,T,C or G
gactggaagagcactgttaacacacgtaaacgactcaacaataacccgttggaggctcatcgttcctattcaggcagatgttatcgaggtccgacnnnnnnaaaacgtatccctaaacatatcctcgatcggatacgcatgaggct

SEQ ID NO: 1493 - DNA, 146 bp, Artificial Sequence
  Bisulfite Padlock Probe
  misc_feature 96, 97, 98, 99, 100, 101: n = A,T,C or G
gactggaagagcactgttaacacacgtaaacgactcaacgataacccgttggaggctcatcgttcctattcaggcagatgttatcgaggtccgacnnnnnnaaaacgtatccctaaacgtatcctcgatcggatacgcatgaggct

SEQ ID NO: 1494 - DNA, 146 bp, Artificial Sequence
  Bisulfite Padlock Probe
  misc_feature 94, 95, 96, 97, 98, 99: n = A,T,C or G
gactggaagagcactgttaacaccaaaaattaactaaaacatcccgttggaggctcatcgttcctattcaggcagatgttatcgaggtccgacnnnnnnaacaaacacgcaacccaaaacccaaaagatcggatacgcatgaggct

SEQ ID NO: 1495 - DNA, 146 bp, Artificial Sequence
  Bisulfite Padlock Probe
  misc_feature 92, 93, 94, 95, 96, 97: n = A,T,C or G
gactggaagagcactgttaacaccaacgaactcccaaactaccgttggaggctcatcgttcctattcaggcagatgttatcgaggtccgacnnnnnnaaaaatcccgaaaaacgaactcaacctaagatcggatacgcatgaggct

SEQ ID NO: 1496 - DNA, 146 bp, Artificial Sequence
  Bisulfite Padlock Probe
  misc_feature 92, 93, 94, 95, 96, 97: n = A,T,C or G
gactggaagagcactgttaacaccaacgaactcccgaactaccgttggaggctcatcgttcctattcaggcagatgttatcgaggtccgacnnnnnnaaaaatcccgaaaaacgaactcgacctaagatcggatacgcatgaggct

SEQ ID NO: 1497 - DNA, 146 bp, Artificial Sequence
  Bisulfite Padlock Probe
  misc_feature 92, 93, 94, 95, 96, 97: n = A,T,C or G
gactggaagagcactgttaacaccccttaataaaataaccttagttggaggctcatcgttcctattcaggcagatgttatcgaggtccgacnnnnnncccaaacctaaattctatttcttcctattgatcggatacgcatgaggct

SEQ ID NO: 1498 - DNA, 146 bp, Artificial Sequence
  Bisulfite Padlock Probe
  misc_feature 93, 94, 95, 96, 97, 98: n = A,T,C or G
gactggaagagcactgttaacaccgacgacgaaaatccaaaaaagttggaggctcatcgttcctattcaggcagatgttatcgaggtccgacnnnnnnccaaatttcacaaataataataaaataagatcggatacgcatgaggct

SEQ ID NO: 1499 - DNA, 146 bp, Artificial Sequence
  Bisulfite Padlock Probe
  misc_feature 93, 94, 95, 96, 97, 98: n = A,T,C or G
gactggaagagcactgttaacaccgacgacgaaaatccgaaaaagttggaggctcatcgttcctattcaggcagatgttatcgaggtccgacnnnnnnccaaatttcacgaataataataaaataagatcggatacgcatgaggct

SEQ ID NO: 1500 - DNA, 146 bp, Artificial Sequence
  Bisulfite Padlock Probe
  misc_feature 92, 93, 94, 95, 96, 97: n = A,T,C or G
gactggaagagcactgttaacacctcgctactaacactaccccgttggaggctcatcgttcctattcaggcagatgttatcgaggtccgacnnnnnnacaataaaacactccaaacttcctcctccgatcggatacgcatgaggct

SEQ ID NO: 1501 - DNA, 146 bp, Artificial Sequence
  Bisulfite Padlock Probe
  misc_feature 92, 93, 94, 95, 96, 97: n = A,T,C or G
gactggaagagcactgttaacacctcgctactaacgctaccccgttggaggctcatcgttcctattcaggcagatgttatcgaggtccgacnnnnnnacaataaaacactccaaacttcctcctccgatcggatacgcatgaggct

SEQ ID NO: 1502 - DNA, 146 bp, Artificial Sequence
  Bisulfite Padlock Probe
  misc_feature 92, 93, 94, 95, 96, 97: n = A,T,C or G
gactggaagagcactgttaacaccttaaccaaacccaaacaaagttggaggctcatcgttcctattcaggcagatgttatcgaggtccgacnnnnnnctttcaaaataaaatctctaacctcacccgatcggatacgcatgaggct

SEQ ID NO: 1503 - DNA, 146 bp, Artificial Sequence
  Bisulfite Padlock Probe
  misc_feature 96, 97, 98, 99, 100, 101: n = A,T,C or G
gactggaagagcactgttaacacgaaaaaccgacacctaaacaaaacgttggaggctcatcgttcctattcaggcagatgttatcgaggtccgacnnnnnntaacaactactacctaatacaaccagatcggatacgcatgaggct

SEQ ID NO: 1504 - DNA, 146 bp, Artificial Sequence
  Bisulfite Padlock Probe
  misc_feature 96, 97, 98, 99, 100, 101: n = A,T,C or G
gactggaagagcactgttaacacgaaaaaccgacgcctaaacaaaacgttggaggctcatcgttcctattcaggcagatgttatcgaggtccgacnnnnnntaacaactactacctaatacaaccagatcggatacgcatgaggct

SEQ ID NO: 1505 - DNA, 146 bp, Artificial Sequence
  Bisulfite Padlock Probe
  misc_feature 93, 94, 95, 96, 97, 98: n = A,T,C or G
gactggaagagcactgttaacacgaaaccaaaataacaaaacccgttggaggctcatcgttcctattcaggcagatgttatcgaggtccgacnnnnnncctacaactatcccaaacacacctcaccgatcggatacgcatgaggct

SEQ ID NO: 1506 - DNA, 146 bp, Artificial Sequence
  Bisulfite Padlock Probe
  misc_feature 93, 94, 95, 96, 97, 98: n = A,T,C or G
gactggaagagcactgttaacacgaaaccaaaataacgaaacccgttggaggctcatcgttcctattcaggcagatgttatcgaggtccgacnnnnnncctacaactatcccaaacgcacctcaccgatcggatacgcatgaggct

SEQ ID NO: 1507 - DNA, 146 bp, Artificial Sequence
  Bisulfite Padlock Probe
  misc_feature 94, 95, 96, 97, 98, 99: n = A,T,C or G
gactggaagagcactgttaacacgacgaacctaaatcaaaacaacgttggaggctcatcgttcctattcaggcagatgttatcgaggtccgacnnnnnnctcaacgtatccgtaaccataaaacccgatcggatacgcatgaggct

SEQ ID NO: 1508 - DNA, 146 bp, Artificial Sequence
  Bisulfite Padlock Probe
  misc_feature 94, 95, 96, 97, 98, 99: n = A,T,C or G
gactggaagagcactgttaacacgacgaacctaaatcaaaacgacgttggaggctcatcgttcctattcaggcagatgttatcgaggtccgacnnnnnnctcaacgtatccgtaaccgtaaaacccgatcggatacgcatgaggct

SEQ ID NO: 1509 - DNA, 146 bp, Artificial Sequence
  Bisulfite Padlock Probe
  misc_feature 93, 94, 95, 96, 97, 98: n = A,T,C or G
gactggaagagcactgttaacacgcacaacgaaaatctaacatcgttggaggctcatcgttcctattcaggcagatgttatcgaggtccgacnnnnnnacttacgaacaacgaatcatctacatacgatcggatacgcatgaggct

SEQ ID NO: 1510 - DNA, 146 bp, Artificial Sequence
  Bisulfite Padlock Probe
  misc_feature 93, 94, 95, 96, 97, 98: n = A,T,C or G
gactggaagagcactgttaacacgcacaacgaaaatctaacgtcgttggaggctcatcgttcctattcaggcagatgttatcgaggtccgacnnnnnnacttacgaacaacgaatcgtctacatacgatcggatacgcatgaggct

SEQ ID NO: 1511 - DNA, 146 bp, Artificial Sequence
  Bisulfite Padlock Probe
  misc_feature 94, 95, 96, 97, 98, 99: n = A,T,C or G
gactggaagagcactgttaacacgctctttctcacaactatccccgttggaggctcatcgttcctattcaggcagatgttatcgaggtccgacnnnnnncctaaaaacccgctacccaaccaactcgatcggatacgcatgaggct

SEQ ID NO: 1512 - DNA, 146 bp, Artificial Sequence
  Bisulfite Padlock Probe
  misc_feature 94, 95, 96, 97, 98, 99: n = A,T,C or G
gactggaagagcactgttaacacgctctttctcgcaactatccccgttggaggctcatcgttcctattcaggcagatgttatcgaggtccgacnnnnnncctaaaaacccgctacccaaccgactcgatcggatacgcatgaggct

SEQ ID NO: 1513 - DNA, 146 bp, Artificial Sequence
  Bisulfite Padlock Probe
  misc_feature 92, 93, 94, 95, 96, 97: n = A,T,C or G
gactggaagagcactgttaacactaaaacctcctaaacaaaaagttggaggctcatcgttcctattcaggcagatgttatcgaggtccgacnnnnnncaacttcacgacaaccacaaccaaaaacagatcggatacgcatgaggct

SEQ ID NO: 1514 - DNA, 146 bp, Artificial Sequence
  Bisulfite Padlock Probe
  misc_feature 92, 93, 94, 95, 96, 97: n = A,T,C or G
gactggaagagcactgttaacactacacgcactccaaacacacgttggaggctcatcgttcctattcaggcagatgttatcgaggtccgacnnnnnncccaaacaatacctctaactactataactgatcggatacgcatgaggct

SEQ ID NO: 1515 - DNA, 146 bp, Artificial Sequence
  Bisulfite Padlock Probe
  misc_feature 92, 93, 94, 95, 96, 97: n = A,T,C or G
gactggaagagcactgttaacactacacgcgctccaaacacacgttggaggctcatcgttcctattcaggcagatgttatcgaggtccgacnnnnnncccaaacgatacctctaactactataactgatcggatacgcatgaggct

SEQ ID NO: 1516 - DNA, 146 bp, Artificial Sequence
  Bisulfite Padlock Probe
  misc_feature 93, 94, 95, 96, 97, 98: n = A,T,C or G
gactggaagagcactgttaacataaaaaccattctctttataaagttggaggctcatcgttcctattcaggcagatgttatcgaggtccgacnnnnnntaacaacaattcccctaccttcccctctgatcggatacgcatgaggct

SEQ ID NO: 1517 - DNA, 146 bp, Artificial Sequence
  Bisulfite Padlock Probe
  misc_feature 93, 94, 95, 96, 97, 98: n = A,T,C or G
gactggaagagcactgttaacataaaaaccgttctctttataaagttggaggctcatcgttcctattcaggcagatgttatcgaggtccgacnnnnnntaacaacaattcccctaccttcccctctgatcggatacgcatgaggct

SEQ ID NO: 1518 - DNA, 146 bp, Artificial Sequence
  Bisulfite Padlock Probe
  misc_feature 93, 94, 95, 96, 97, 98: n = A,T,C or G
gactggaagagcactgttaacataaccctcgaacaccccataccgttggaggctcatcgttcctattcaggcagatgttatcgaggtccgacnnnnnnccctctcaaaacctctctccctttctatgatcggatacgcatgaggct

SEQ ID NO: 1519 - DNA, 146 bp, Artificial Sequence
  Bisulfite Padlock Probe
  misc_feature 93, 94, 95, 96, 97, 98: n = A,T,C or G
gactggaagagcactgttaacataaccctcgaacgccccataccgttggaggctcatcgttcctattcaggcagatgttatcgaggtccgacnnnnnnccctctcaaaacctctctccctttctatgatcggatacgcatgaggct

SEQ ID NO: 1520 - DNA, 146 bp, Artificial Sequence
  Bisulfite Padlock Probe
  misc_feature 92, 93, 94, 95, 96, 97: n = A,T,C or G
gactggaagagcactgttaacataacctctctcccttccctccgttggaggctcatcgttcctattcaggcagatgttatcgaggtccgacnnnnnntataaccaaatcaatatataaaatattaagatcggatacgcatgaggct

SEQ ID NO: 1521 - DNA, 146 bp, Artificial Sequence
  Bisulfite Padlock Probe
  misc_feature 94, 95, 96, 97, 98, 99: n = A,T,C or G
gactggaagagcactgttaacatcaccaaatatatacaaatatacgttggaggctcatcgttcctattcaggcagatgttatcgaggtccgacnnnnnnaaaacgaaaacaaaatccaattcctacgatcggatacgcatgaggct

SEQ ID NO: 1522 - DNA, 146 bp, Artificial Sequence
  Bisulfite Padlock Probe
  misc_feature 94, 95, 96, 97, 98, 99: n = A,T,C or G
gactggaagagcactgttaacatcaccaaatatatacaaatatacgttggaggctcatcgttcctattcaggcagatgttatcgaggtccgacnnnnnnaaaacgaaaacgaaatccaattcctacgatcggatacgcatgaggct

SEQ ID NO: 1523 - DNA, 146 bp, Artificial Sequence
  Bisulfite Padlock Probe
  misc_feature 92, 93, 94, 95, 96, 97: n = A,T,C or G
gactggaagagcactgttaacatcccaataaactctaacacccgttggaggctcatcgttcctattcaggcagatgttatcgaggtccgacnnnnnnaacgacaaccgaaaatccgaaacaactaagatcggatacgcatgaggct

SEQ ID NO: 1524 - DNA, 146 bp, Artificial Sequence
  Bisulfite Padlock Probe
  misc_feature 92, 93, 94, 95, 96, 97: n = A,T,C or G
gactggaagagcactgttaacatcccaataaactctaacacccgttggaggctcatcgttcctattcaggcagatgttatcgaggtccgacnnnnnnaacgacaaccgaaaatccgaaacgactaagatcggatacgcatgaggct

SEQ ID NO: 1525 - DNA, 146 bp, Artificial Sequence
  Bisulfite Padlock Probe
  misc_feature 93, 94, 95, 96, 97, 98: n = A,T,C or G
gactggaagagcactgttaacatcgcacacctacaacctataacgttggaggctcatcgttcctattcaggcagatgttatcgaggtccgacnnnnnncccataaccctcatacgctccaaactctgatcggatacgcatgaggct

SEQ ID NO: 1526 - DNA, 146 bp, Artificial Sequence
  Bisulfite Padlock Probe
  misc_feature 93, 94, 95, 96, 97, 98: n = A,T,C or G
gactggaagagcactgttaacatcgcgcacctacaacctataacgttggaggctcatcgttcctattcaggcagatgttatcgaggtccgacnnnnnncccataaccctcatacgctccgaactctgatcggatacgcatgaggct

SEQ ID NO: 1527 - DNA, 146 bp, Artificial Sequence
  Bisulfite Padlock Probe
  misc_feature 92, 93, 94, 95, 96, 97: n = A,T,C or G
gactggaagagcactgttaacatctttcttttcaaaacaaaaagttggaggctcatcgttcctattcaggcagatgttatcgaggtccgacnnnnnncaatctctaccgaacgcaaactaaatcaagatcggatacgcatgaggct

SEQ ID NO: 1528 - DNA, 146 bp, Artificial Sequence
  Bisulfite Padlock Probe
  misc_feature 96, 97, 98, 99, 100, 101: n = A,T,C or G
gactggaagagcactgttaacattaacaactactataacttctactcgttggaggctcatcgttcctattcaggcagatgttatcgaggtccgacnnnnnnaacgccctcctcaatcaaatccatcgatcggatacgcatgaggct

SEQ ID NO: 1529 - DNA, 146 bp, Artificial Sequence
  Bisulfite Padlock Probe
  misc_feature 96, 97, 98, 99, 100, 101: n = A,T,C or G
gactggaagagcactgttaacattaacgactactataacttctactcgttggaggctcatcgttcctattcaggcagatgttatcgaggtccgacnnnnnnaacgccctcctcgatcaaatccatcgatcggatacgcatgaggct

SEQ ID NO: 1530 - DNA, 146 bp, Artificial Sequence
  Bisulfite Padlock Probe
  misc_feature 92, 93, 94, 95, 96, 97: n = A,T,C or G
gactggaagagcactgttaacatttaaaatcaatttcattaccgttggaggctcatcgttcctattcaggcagatgttatcgaggtccgacnnnnnnaaacaacacaataaaaaccctaaaacctcgatcggatacgcatgaggct

SEQ ID NO: 1531 - DNA, 146 bp, Artificial Sequence
  Bisulfite Padlock Probe
  misc_feature 92, 93, 94, 95, 96, 97: n = A,T,C or G
gactggaagagcactgttaacatttaaaatcgatttcattaccgttggaggctcatcgttcctattcaggcagatgttatcgaggtccgacnnnnnnaaacaacacaataaaaaccctaaaacctcgatcggatacgcatgaggct

SEQ ID NO: 1532 - DNA, 146 bp, Artificial Sequence
  Bisulfite Padlock Probe
  misc_feature 92, 93, 94, 95, 96, 97: n = A,T,C or G
gactggaagagcactgttaacatttctctctacacctcctcaagttggaggctcatcgttcctattcaggcagatgttatcgaggtccgacnnnnnncaaactcaaaaccaataaaacccccaacagatcggatacgcatgaggct

SEQ ID NO: 1533 - DNA, 146 bp, Artificial Sequence
  Bisulfite Padlock Probe
  misc_feature 94, 95, 96, 97, 98, 99: n = A,T,C or G
gactggaagagcactgttaaccaaaaaccttcctcacccatttccgttggaggctcatcgttcctattcaggcagatgttatcgaggtccgacnnnnnnaaccaaaacaccccgcacttaaaaacagatcggatacgcatgaggct

SEQ ID NO: 1534 - DNA, 146 bp, Artificial Sequence
  Bisulfite Padlock Probe
  misc_feature 94, 95, 96, 97, 98, 99: n = A,T,C or G
gactggaagagcactgttaaccaaaaaccttcctcgcccatttccgttggaggctcatcgttcctattcaggcagatgttatcgaggtccgacnnnnnnaaccaaaacaccccgcgcttaaaaacagatcggatacgcatgaggct

SEQ ID NO: 1535 - DNA, 146 bp, Artificial Sequence
  Bisulfite Padlock Probe
  misc_feature 93, 94, 95, 96, 97, 98: n = A,T,C or G
gactggaagagcactgttaaccaaaaacgaatctcgcatccaacgttggaggctcatcgttcctattcaggcagatgttatcgaggtccgacnnnnnnaacaaacctaaaacgccataaacaaaccgatcggatacgcatgaggct

SEQ ID NO: 1536 - DNA, 146 bp, Artificial Sequence
  Bisulfite Padlock Probe
  misc_feature 93, 94, 95, 96, 97, 98: n = A,T,C or G
gactggaagagcactgttaaccaaaaacgaatctcgcatccgacgttggaggctcatcgttcctattcaggcagatgttatcgaggtccgacnnnnnnaacaaacctaaaacgccgtaaacaaaccgatcggatacgcatgaggct

SEQ ID NO: 1537 - DNA, 146 bp, Artificial Sequence
  Bisulfite Padlock Probe
  misc_feature 92, 93, 94, 95, 96, 97: n = A,T,C or G
gactggaagagcactgttaaccaaaaactaaaatacctaaacagttggaggctcatcgttcctattcaggcagatgttatcgaggtccgacnnnnnnaaaaacgaaacgctaaacaactttacttcgatcggatacgcatgaggct

SEQ ID NO: 1538 - DNA, 146 bp, Artificial Sequence
  Bisulfite Padlock Probe
  misc_feature 92, 93, 94, 95, 96, 97: n = A,T,C or G
gactggaagagcactgttaaccaaaaactaaaatacctaaacggttggaggctcatcgttcctattcaggcagatgttatcgaggtccgacnnnnnnaaaaacgaaacgctaaacgactttacttcgatcggatacgcatgaggct

SEQ ID NO: 1539 - DNA, 146 bp, Artificial Sequence
  Bisulfite Padlock Probe
  misc_feature 94, 95, 96, 97, 98, 99: n = A,T,C or G
gactggaagagcactgttaaccaaaaatccgcgaatacgaaacacgttggaggctcatcgttcctattcaggcagatgttatcgaggtccgacnnnnnnaaaacccgtaaccgctacccaaaactcgatcggatacgcatgaggct

SEQ ID NO: 1540 - DNA, 146 bp, Artificial Sequence
  Bisulfite Padlock Probe
  misc_feature 94, 95, 96, 97, 98, 99: n = A,T,C or G
gactggaagagcactgttaaccaaaaatccgcgaatacgaaacgcgttggaggctcatcgttcctattcaggcagatgttatcgaggtccgacnnnnnnaaaacccgtaaccgctacccgaaactcgatcggatacgcatgaggct

SEQ ID NO: 1541 - DNA, 146 bp, Artificial Sequence
  Bisulfite Padlock Probe
  misc_feature 92, 93, 94, 95, 96, 97: n = A,T,C or G
gactggaagagcactgttaaccaaaacgacacgctcgcatttcgttggaggctcatcgttcctattcaggcagatgttatcgaggtccgacnnnnnnaccgtaacgaaacgcgaaaacactaaaaagatcggatacgcatgaggct

SEQ ID NO: 1542 - DNA, 146 bp, Artificial Sequence
  Bisulfite Padlock Probe
  misc_feature 92, 93, 94, 95, 96, 97: n = A,T,C or G
gactggaagagcactgttaaccaaaacgacacgctcgcgtttcgttggaggctcatcgttcctattcaggcagatgttatcgaggtccgacnnnnnnaccgtaacgaaacgcgaaaacgctaaaaagatcggatacgcatgaggct

SEQ ID NO: 1543 - DNA, 146 bp, Artificial Sequence
  Bisulfite Padlock Probe
  misc_feature 93, 94, 95, 96, 97, 98: n = A,T,C or G
gactggaagagcactgttaaccaaaactactaccccaacaaaacgttggaggctcatcgttcctattcaggcagatgttatcgaggtccgacnnnnnnaaactcctactcttatcgacataaatccgatcggatacgcatgaggct

SEQ ID NO: 1544 - DNA, 146 bp, Artificial Sequence
  Bisulfite Padlock Probe
  misc_feature 93, 94, 95, 96, 97, 98: n = A,T,C or G
gactggaagagcactgttaaccaaaactactaccccaacaaaacgttggaggctcatcgttcctattcaggcagatgttatcgaggtccgacnnnnnnaaactcctactcttatcgacgtaaatccgatcggatacgcatgaggct

SEQ ID NO: 1545 - DNA, 146 bp, Artificial Sequence
  Bisulfite Padlock Probe
  misc_feature 92, 93, 94, 95, 96, 97: n = A,T,C or G
gactggaagagcactgttaaccaaaacttctaatacaaccaccgttggaggctcatcgttcctattcaggcagatgttatcgaggtccgacnnnnnnacctaacaattaacctatattaaaattacgatcggatacgcatgaggct

SEQ ID NO: 1546 - DNA, 146 bp, Artificial Sequence
  Bisulfite Padlock Probe
  misc_feature 93, 94, 95, 96, 97, 98: n = A,T,C or G
gactggaagagcactgttaaccaaacgactacccaatcaactatgttggaggctcatcgttcctattcaggcagatgttatcgaggtccgacnnnnnnctcaaatctaaacaacgtctcccaacaagatcggatacgcatgaggct

SEQ ID NO: 1547 - DNA, 146 bp, Artificial Sequence
  Bisulfite Padlock Probe
  misc_feature 93, 94, 95, 96, 97, 98: n = A,T,C or G
gactggaagagcactgttaaccaaacgactacccgatcaactatgttggaggctcatcgttcctattcaggcagatgttatcgaggtccgacnnnnnnctcaaatctaaacaacgtctcccgacaagatcggatacgcatgaggct

SEQ ID NO: 1548 - DNA, 146 bp, Artificial Sequence
  Bisulfite Padlock Probe
  misc_feature 92, 93, 94, 95, 96, 97: n = A,T,C or G
gactggaagagcactgttaaccaaataaacaaaactattaaaagttggaggctcatcgttcctattcaggcagatgttatcgaggtccgacnnnnnnaaaaatttcatccaattaactatctctttgatcggatacgcatgaggct

SEQ ID NO: 1549 - DNA, 146 bp, Artificial Sequence
  Bisulfite Padlock Probe
  misc_feature 92, 93, 94, 95, 96, 97: n = A,T,C or G
gactggaagagcactgttaaccaaataaacgaaactattaaaagttggaggctcatcgttcctattcaggcagatgttatcgaggtccgacnnnnnnaaaaatttcatccgattaactatctctttgatcggatacgcatgaggct

SEQ ID NO: 1550 - DNA, 146 bp, Artificial Sequence
  Bisulfite Padlock Probe
  misc_feature 95, 96, 97, 98, 99, 100: n = A,T,C or G
gactggaagagcactgttaaccaaatacgcacaaaacctataaaacgttggaggctcatcgttcctattcaggcagatgttatcgaggtccgacnnnnnntccgccctaataaccttcacaaaaaagatcggatacgcatgaggct

SEQ ID NO: 1551 - DNA, 146 bp, Artificial Sequence
  Bisulfite Padlock Probe
  misc_feature 95, 96, 97, 98, 99, 100: n = A,T,C or G
gactggaagagcactgttaaccaaatacgcgcaaaacctataaaacgttggaggctcatcgttcctattcaggcagatgttatcgaggtccgacnnnnnntccgccctaataaccttcacgaaaaagatcggatacgcatgaggct

SEQ ID NO: 1552 - DNA, 146 bp, Artificial Sequence
  Bisulfite Padlock Probe
  misc_feature 96, 97, 98, 99, 100, 101: n = A,T,C or G
gactggaagagcactgttaaccaacaatactaactctacaataaaaagttggaggctcatcgttcctattcaggcagatgttatcgaggtccgacnnnnnnaacacctaccctaacccctacccccgatcggatacgcatgaggct

SEQ ID NO: 1553 - DNA, 146 bp, Artificial Sequence
  Bisulfite Padlock Probe
  misc_feature 93, 94, 95, 96, 97, 98: n = A,T,C or G
gactggaagagcactgttaaccaaccaccaacaacaacaacaacgttggaggctcatcgttcctattcaggcagatgttatcgaggtccgacnnnnnncttacccgtcaaaaaacaaacacaaattgatcggatacgcatgaggct

SEQ ID NO: 1554 - DNA, 146 bp, Artificial Sequence
  Bisulfite Padlock Probe
  misc_feature 93, 94, 95, 96, 97, 98: n = A,T,C or G
gactggaagagcactgttaaccaaccatactacaaaccctatacgttggaggctcatcgttcctattcaggcagatgttatcgaggtccgacnnnnnntcgaacctccctacctattatcaaaaccgatcggatacgcatgaggct

SEQ ID NO: 1555 - DNA, 146 bp, Artificial Sequence
  Bisulfite Padlock Probe
  misc_feature 93, 94, 95, 96, 97, 98: n = A,T,C or G
gactggaagagcactgttaaccaaccgtactacaaaccctatacgttggaggctcatcgttcctattcaggcagatgttatcgaggtccgacnnnnnntcgaacctccctacctattatcgaaaccgatcggatacgcatgaggct

SEQ ID NO: 1556 - DNA, 146 bp, Artificial Sequence
  Bisulfite Padlock Probe
  misc_feature 92, 93, 94, 95, 96, 97: n = A,T,C or G
gactggaagagcactgttaaccaacctcccaaccacaaacacagttggaggctcatcgttcctattcaggcagatgttatcgaggtccgacnnnnnncaaaactcccaacctaactcactacaattgatcggatacgcatgaggct

SEQ ID NO: 1557 - DNA, 146 bp, Artificial Sequence
  Bisulfite Padlock Probe
  misc_feature 92, 93, 94, 95, 96, 97: n = A,T,C or G
gactggaagagcactgttaaccaacctcccaaccacaaacacagttggaggctcatcgttcctattcaggcagatgttatcgaggtccgacnnnnnncgaaactcccaacctaactcactacaattgatcggatacgcatgaggct

SEQ ID NO: 1558 - DNA, 146 bp, Artificial Sequence
  Bisulfite Padlock Probe
  misc_feature 94, 95, 96, 97, 98, 99: n = A,T,C or G
gactggaagagcactgttaaccaactaaaacgccaaaacaaccaagttggaggctcatcgttcctattcaggcagatgttatcgaggtccgacnnnnnnatttatttcaaaataaacccaacaaatgatcggatacgcatgaggct

SEQ ID NO: 1559 - DNA, 146 bp, Artificial Sequence
  Bisulfite Padlock Probe
  misc_feature 94, 95, 96, 97, 98, 99: n = A,T,C or G
gactggaagagcactgttaaccaactaaaacgccgaaacaaccaagttggaggctcatcgttcctattcaggcagatgttatcgaggtccgacnnnnnnatttatttcaaaataaacccaacaaatgatcggatacgcatgaggct

SEQ ID NO: 1560 - DNA, 146 bp, Artificial Sequence
  Bisulfite Padlock Probe
  misc_feature 94, 95, 96, 97, 98, 99: n = A,T,C or G
gactggaagagcactgttaaccaactttttccaaaaaccacatacgttggaggctcatcgttcctattcaggcagatgttatcgaggtccgacnnnnnnaatccgaaaaccgaaacaaaataaaaagatcggatacgcatgaggct

SEQ ID NO: 1561 - DNA, 146 bp, Artificial Sequence
  Bisulfite Padlock Probe
  misc_feature 94, 95, 96, 97, 98, 99: n = A,T,C or G
gactggaagagcactgttaaccaactttttccaaaaaccacatacgttggaggctcatcgttcctattcaggcagatgttatcgaggtccgacnnnnnnaatccgaaaaccgaaacgaaataaaaagatcggatacgcatgaggct

SEQ ID NO: 1562 - DNA, 146 bp, Artificial Sequence
  Bisulfite Padlock Probe
  misc_feature 94, 95, 96, 97, 98, 99: n = A,T,C or G
gactggaagagcactgttaaccacaacctactacaaaataaatacgttggaggctcatcgttcctattcaggcagatgttatcgaggtccgacnnnnnnaaataaacccttcccaccaaaacacacgatcggatacgcatgaggct

SEQ ID NO: 1563 - DNA, 146 bp, Artificial Sequence
  Bisulfite Padlock Probe
  misc_feature 94, 95, 96, 97, 98, 99: n = A,T,C or G
gactggaagagcactgttaaccacaacctactacaaaataaatacgttggaggctcatcgttcctattcaggcagatgttatcgaggtccgacnnnnnnaaataaacccttcccgccaaaacacacgatcggatacgcatgaggct

SEQ ID NO: 1564 - DNA, 146 bp, Artificial Sequence
  Bisulfite Padlock Probe
  misc_feature 92, 93, 94, 95, 96, 97: n = A,T,C or G
gactggaagagcactgttaaccaccccacctaaatcaacccccgttggaggctcatcgttcctattcaggcagatgttatcgaggtccgacnnnnnntaaaactaaacaaaaaacaacaaaaacaagatcggatacgcatgaggct

SEQ ID NO: 1565 - DNA, 146 bp, Artificial Sequence
  Bisulfite Padlock Probe
  misc_feature 92, 93, 94, 95, 96, 97: n = A,T,C or G
gactggaagagcactgttaaccaccccacctaaatcaacccccgttggaggctcatcgttcctattcaggcagatgttatcgaggtccgacnnnnnntaaaactaaacgaaaaacaacaaaaacaagatcggatacgcatgaggct

SEQ ID NO: 1566 - DNA, 146 bp, Artificial Sequence
  Bisulfite Padlock Probe
  misc_feature 94, 95, 96, 97, 98, 99: n = A,T,C or G
gactggaagagcactgttaaccaccttacgcaaccaaacaaacacgttggaggctcatcgttcctattcaggcagatgttatcgaggtccgacnnnnnnctaatcccccaaactaatccctaaaaagatcggatacgcatgaggct

SEQ ID NO: 1567 - DNA, 146 bp, Artificial Sequence
  Bisulfite Padlock Probe
  misc_feature 94, 95, 96, 97, 98, 99: n = A,T,C or G
gactggaagagcactgttaaccaccttacgcaaccgaacaaacacgttggaggctcatcgttcctattcaggcagatgttatcgaggtccgacnnnnnnctaatcccccgaactaatccctaaaaagatcggatacgcatgaggct

SEQ ID NO: 1568 - DNA, 146 bp, Artificial Sequence
  Bisulfite Padlock Probe
  misc_feature 93, 94, 95, 96, 97, 98: n = A,T,C or G
gactggaagagcactgttaaccataaaacaccaccaactccccagttggaggctcatcgttcctattcaggcagatgttatcgaggtccgacnnnnnncctaaccaaaacgcaacaaatctaaaaagatcggatacgcatgaggct

SEQ ID NO: 1569 - DNA, 146 bp, Artificial Sequence
  Bisulfite Padlock Probe
  misc_feature 93, 94, 95, 96, 97, 98: n = A,T,C or G
gactggaagagcactgttaaccataaaacaccgccaactccccagttggaggctcatcgttcctattcaggcagatgttatcgaggtccgacnnnnnncctaaccaaaacgcaacgaatctaaaaagatcggatacgcatgaggct

SEQ ID NO: 1570 - DNA, 146 bp, Artificial Sequence
  Bisulfite Padlock Probe
  misc_feature 92, 93, 94, 95, 96, 97: n = A,T,C or G
gactggaagagcactgttaacccaaaccgatcaacatataaacgttggaggctcatcgttcctattcaggcagatgttatcgaggtccgacnnnnnnatcctcctccctactaaaatatacataatgatcggatacgcatgaggct

SEQ ID NO: 1571 - DNA, 146 bp, Artificial Sequence
  Bisulfite Padlock Probe
  misc_feature 92, 93, 94, 95, 96, 97: n = A,T,C or G
gactggaagagcactgttaacccaaaccgatcaacgtataaacgttggaggctcatcgttcctattcaggcagatgttatcgaggtccgacnnnnnnatcctcctccctactaaaatatacataatgatcggatacgcatgaggct

SEQ ID NO: 1572 - DNA, 146 bp, Artificial Sequence
  Bisulfite Padlock Probe
  misc_feature 96, 97, 98, 99, 100, 101: n = A,T,C or G
gactggaagagcactgttaacccaacccaaacactaataactactacgttggaggctcatcgttcctattcaggcagatgttatcgaggtccgacnnnnnnaaataaaatataacctccacaaaaagatcggatacgcatgaggct

SEQ ID NO: 1573 - DNA, 146 bp, Artificial Sequence
  Bisulfite Padlock Probe
  misc_feature 96, 97, 98, 99, 100, 101: n = A,T,C or G
gactggaagagcactgttaacccaacccaaacgctaataactactacgttggaggctcatcgttcctattcaggcagatgttatcgaggtccgacnnnnnnaaataaaatataacctccacaaaaagatcggatacgcatgaggct

SEQ ID NO: 1574 - DNA, 146 bp, Artificial Sequence
  Bisulfite Padlock Probe
  misc_feature 92, 93, 94, 95, 96, 97: n = A,T,C or G
gactggaagagcactgttaacccaacctcaaccaaccaaacaagttggaggctcatcgttcctattcaggcagatgttatcgaggtccgacnnnnnntacccacaaaacactaactaacctaaaaagatcggatacgcatgaggct

SEQ ID NO: 1575 - DNA, 146 bp, Artificial Sequence
  Bisulfite Padlock Probe
  misc_feature 92, 93, 94, 95, 96, 97: n = A,T,C or G
gactggaagagcactgttaacccaacctcaaccaaccaaacaagttggaggctcatcgttcctattcaggcagatgttatcgaggtccgacnnnnnntacccacaaaacgctaactaacctaaaaagatcggatacgcatgaggct

SEQ ID NO: 1576 - DNA, 146 bp, Artificial Sequence
  Bisulfite Padlock Probe
  misc_feature 96, 97, 98, 99, 100, 101: n = A,T,C or G
gactggaagagcactgttaacccacctaccgctaaacgcaaattaaagttggaggctcatcgttcctattcaggcagatgttatcgaggtccgacnnnnnntctcctcgaaatcaaaaaactacccgatcggatacgcatgaggct

SEQ ID NO: 1577 - DNA, 146 bp, Artificial Sequence
  Bisulfite Padlock Probe
  misc_feature 96, 97, 98, 99, 100, 101: n = A,T,C or G
gactggaagagcactgttaacccacctaccgctaaacgcgaattaaagttggaggctcatcgttcctattcaggcagatgttatcgaggtccgacnnnnnntctcctcgaaatcgaaaaactacccgatcggatacgcatgaggct

SEQ ID NO: 1578 - DNA, 146 bp, Artificial Sequence
  Bisulfite Padlock Probe
  misc_feature 92, 93, 94, 95, 96, 97: n = A,T,C or G
gactggaagagcactgttaacccataaaacaaaaaactataaagttggaggctcatcgttcctattcaggcagatgttatcgaggtccgacnnnnnnaaatcatactaaccaaatactcgcactccgatcggatacgcatgaggct

SEQ ID NO: 1579 - DNA, 146 bp, Artificial Sequence
  Bisulfite Padlock Probe
  misc_feature 95, 96, 97, 98, 99, 100: n = A,T,C or G
gactggaagagcactgttaacccataaaaccataacctataaaatcgttggaggctcatcgttcctattcaggcagatgttatcgaggtccgacnnnnnnctattccccgaaaaaccactacccccgatcggatacgcatgaggct

SEQ ID NO: 1580 - DNA, 146 bp, Artificial Sequence
  Bisulfite Padlock Probe
  misc_feature 95, 96, 97, 98, 99, 100: n = A,T,C or G
gactggaagagcactgttaacccataaaaccataacctataaaatcgttggaggctcatcgttcctattcaggcagatgttatcgaggtccgacnnnnnnctattccccgaaaaaccgctacccccgatcggatacgcatgaggct

SEQ ID NO: 1581 - DNA, 146 bp, Artificial Sequence
  Bisulfite Padlock Probe
  misc_feature 92, 93, 94, 95, 96, 97: n = A,T,C or G
gactggaagagcactgttaacccataaaacgaaaaactataaagttggaggctcatcgttcctattcaggcagatgttatcgaggtccgacnnnnnnaaatcatactaaccaaatactcgcgctccgatcggatacgcatgaggct

SEQ ID NO: 1582 - DNA, 146 bp, Artificial Sequence
  Bisulfite Padlock Probe
  misc_feature 92, 93, 94, 95, 96, 97: n = A,T,C or G
gactggaagagcactgttaaccccaacccttaaaactatactcgttggaggctcatcgttcctattcaggcagatgttatcgaggtccgacnnnnnntcaacccccaccctacaaaactatataccgatcggatacgcatgaggct

SEQ ID NO: 1583 - DNA, 146 bp, Artificial Sequence
  Bisulfite Padlock Probe
  misc_feature 92, 93, 94, 95, 96, 97: n = A,T,C or G
gactggaagagcactgttaaccccaactccacttaacccactcgttggaggctcatcgttcctattcaggcagatgttatcgaggtccgacnnnnnnaaaacaaaccctctacgaacgcaaaaaccgatcggatacgcatgaggct

SEQ ID NO: 1584 - DNA, 146 bp, Artificial Sequence
  Bisulfite Padlock Probe
  misc_feature 92, 93, 94, 95, 96, 97: n = A,T,C or G
gactggaagagcactgttaaccccaactccacttaacccactcgttggaggctcatcgttcctattcaggcagatgttatcgaggtccgacnnnnnnaaaacaaaccctctacgaacgcgaaaaccgatcggatacgcatgaggct

SEQ ID NO: 1585 - DNA, 146 bp, Artificial Sequence
  Bisulfite Padlock Probe
  misc_feature 96, 97, 98, 99, 100, 101: n = A,T,C or G
gactggaagagcactgttaacccccaaaaacataaaaataaccattcgttggaggctcatcgttcctattcaggcagatgttatcgaggtccgacnnnnnncgctcctaccaaacaaacttaaaacgatcggatacgcatgaggct

SEQ ID NO: 1586 - DNA, 146 bp, Artificial Sequence
  Bisulfite Padlock Probe
  misc_feature 92, 93, 94, 95, 96, 97: n = A,T,C or G
gactggaagagcactgttaacccccacaaaacccctttataacgttggaggctcatcgttcctattcaggcagatgttatcgaggtccgacnnnnnnaaatcaaaacgcactaaaaacaaataaaagatcggatacgcatgaggct

SEQ ID NO: 1587 - DNA, 146 bp, Artificial Sequence
  Bisulfite Padlock Probe
  misc_feature 93, 94, 95, 96, 97, 98: n = A,T,C or G
gactggaagagcactgttaacccccactaaccaacaaaataaacgttggaggctcatcgttcctattcaggcagatgttatcgaggtccgacnnnnnnaaaaatcgaacccgaaatcacgcaactcgatcggatacgcatgaggct

SEQ ID NO: 1588 - DNA, 146 bp, Artificial Sequence
  Bisulfite Padlock Probe
  misc_feature 96, 97, 98, 99, 100, 101: n = A,T,C or G
gactggaagagcactgttaacccccgaaaacataaaaataaccattcgttggaggctcatcgttcctattcaggcagatgttatcgaggtccgacnnnnnncgctcctaccaaacgaacttaaaacgatcggatacgcatgaggct

SEQ ID NO: 1589 - DNA, 146 bp, Artificial Sequence
  Bisulfite Padlock Probe
  misc_feature 92, 93, 94, 95, 96, 97: n = A,T,C or G
gactggaagagcactgttaacccccgcaaaacccctttataacgttggaggctcatcgttcctattcaggcagatgttatcgaggtccgacnnnnnnaaatcaaaacgcactaaaaacgaataaaagatcggatacgcatgaggct

SEQ ID NO: 1590 - DNA, 146 bp, Artificial Sequence
  Bisulfite Padlock Probe
  misc_feature 93, 94, 95, 96, 97, 98: n = A,T,C or G
gactggaagagcactgttaacccccgctaaccaacaaaataaacgttggaggctcatcgttcctattcaggcagatgttatcgaggtccgacnnnnnnaaaaatcgaacccgaaatcacgcgactcgatcggatacgcatgaggct

SEQ ID NO: 1591 - DNA, 146 bp, Artificial Sequence
  Bisulfite Padlock Probe
  misc_feature 94, 95, 96, 97, 98, 99: n = A,T,C or G
gactggaagagcactgttaacccccgctctccaaaaaactaaaccgttggaggctcatcgttcctattcaggcagatgttatcgaggtccgacnnnnnnaaaaacgacacgaacatctcttccaccgatcggatacgcatgaggct

SEQ ID NO: 1592 - DNA, 146 bp, Artificial Sequence
  Bisulfite Padlock Probe
  misc_feature 94, 95, 96, 97, 98, 99: n = A,T,C or G
gactggaagagcactgttaacccccgctctccgaaaaactaaaccgttggaggctcatcgttcctattcaggcagatgttatcgaggtccgacnnnnnnaaaaacgacacgaacgtctcttccaccgatcggatacgcatgaggct

SEQ ID NO: 1593 - DNA, 146 bp, Artificial Sequence
  Bisulfite Padlock Probe
  misc_feature 96, 97, 98, 99, 100, 101: n = A,T,C or G
gactggaagagcactgttaacccccgtaactaacaaaacctcctaccgttggaggctcatcgttcctattcaggcagatgttatcgaggtccgacnnnnnnaccccctacctaaccccaaacctacgatcggatacgcatgaggct

SEQ ID NO: 1594 - DNA, 146 bp, Artificial Sequence
  Bisulfite Padlock Probe
  misc_feature 96, 97, 98, 99, 100, 101: n = A,T,C or G
gactggaagagcactgttaacccccgtaactaacgaaacctcctaccgttggaggctcatcgttcctattcaggcagatgttatcgaggtccgacnnnnnnaccccctacctaaccccgaacctacgatcggatacgcatgaggct

SEQ ID NO: 1595 - DNA, 146 bp, Artificial Sequence
  Bisulfite Padlock Probe
  misc_feature 93, 94, 95, 96, 97, 98: n = A,T,C or G
gactggaagagcactgttaaccccctccaattcaactccctcctgttggaggctcatcgttcctattcaggcagatgttatcgaggtccgacnnnnnnaaaataccaaaacacccaaaatcaaaaagatcggatacgcatgaggct

SEQ ID NO: 1596 - DNA, 146 bp, Artificial Sequence
  Bisulfite Padlock Probe
  misc_feature 93, 94, 95, 96, 97, 98: n = A,T,C or G
gactggaagagcactgttaaccccgaaaaccgtcaatctaaaaagttggaggctcatcgttcctattcaggcagatgttatcgaggtccgacnnnnnncaaaccaaacccttccccaaatacaaccgatcggatacgcatgaggct

SEQ ID NO: 1597 - DNA, 146 bp, Artificial Sequence
  Bisulfite Padlock Probe
  misc_feature 93, 94, 95, 96, 97, 98: n = A,T,C or G
gactggaagagcactgttaaccccgaaaaccgtcgatctaaaaagttggaggctcatcgttcctattcaggcagatgttatcgaggtccgacnnnnnncaaaccgaacccttccccaaatacaaccgatcggatacgcatgaggct

SEQ ID NO: 1598 - DNA, 146 bp, Artificial Sequence
  Bisulfite Padlock Probe
  misc_feature 92, 93, 94, 95, 96, 97: n = A,T,C or G
gactggaagagcactgttaaccccgacccttaaaactatactcgttggaggctcatcgttcctattcaggcagatgttatcgaggtccgacnnnnnntcaacccccaccctacaaaactatataccgatcggatacgcatgaggct

SEQ ID NO: 1599 - DNA, 146 bp, Artificial Sequence
  Bisulfite Padlock Probe
  misc_feature 95, 96, 97, 98, 99, 100: n = A,T,C or G
gactggaagagcactgttaacccctaaaaccctacctcccaaaaccgttggaggctcatcgttcctattcaggcagatgttatcgaggtccgacnnnnnnccctaaaccgacataaaccccaaacagatcggatacgcatgaggct

SEQ ID NO: 1600 - DNA, 146 bp, Artificial Sequence
  Bisulfite Padlock Probe
  misc_feature 95, 96, 97, 98, 99, 100: n = A,T,C or G
gactggaagagcactgttaacccctaaaaccctacctcccaaaaccgttggaggctcatcgttcctattcaggcagatgttatcgaggtccgacnnnnnnccctaaaccgacataaaccccgaacagatcggatacgcatgaggct

SEQ ID NO: 1601 - DNA, 146 bp, Artificial Sequence
  Bisulfite Padlock Probe
  misc_feature 92, 93, 94, 95, 96, 97: n = A,T,C or G
gactggaagagcactgttaacccgaaccatatccaacttatacgttggaggctcatcgttcctattcaggcagatgttatcgaggtccgacnnnnnntcgaaaaacaccataaattcaaaacaaccgatcggatacgcatgaggct

SEQ ID NO: 1602 - DNA, 146 bp, Artificial Sequence
  Bisulfite Padlock Probe
  misc_feature 92, 93, 94, 95, 96, 97: n = A,T,C or G
gactggaagagcactgttaacccgaaccgtatccaacttatacgttggaggctcatcgttcctattcaggcagatgttatcgaggtccgacnnnnnntcgaaaaacaccataaattcgaaacaaccgatcggatacgcatgaggct

SEQ ID NO: 1603 - DNA, 146 bp, Artificial Sequence
  Bisulfite Padlock Probe
  misc_feature 95, 96, 97, 98, 99, 100: n = A,T,C or G
gactggaagagcactgttaacccgacccaccaacaaataaatcaatgttggaggctcatcgttcctattcaggcagatgttatcgaggtccgacnnnnnnaaaaccgaaaaataccgaactacatagatcggatacgcatgaggct

SEQ ID NO: 1604 - DNA, 146 bp, Artificial Sequence
  Bisulfite Padlock Probe
  misc_feature 95, 96, 97, 98, 99, 100: n = A,T,C or G
gactggaagagcactgttaacccgacccaccgacaaataaatcaatgttggaggctcatcgttcctattcaggcagatgttatcgaggtccgacnnnnnnaaaaccgaaaaataccgaactacgtagatcggatacgcatgaggct

SEQ ID NO: 1605 - DNA, 146 bp, Artificial Sequence
  Bisulfite Padlock Probe
  misc_feature 95, 96, 97, 98, 99, 100: n = A,T,C or G
gactggaagagcactgttaacccgacgcacataaaaacctaaaaacgttggaggctcatcgttcctattcaggcagatgttatcgaggtccgacnnnnnncatcaaaccactccttaaataaaaccgatcggatacgcatgaggct

SEQ ID NO: 1606 - DNA, 146 bp, Artificial Sequence
  Bisulfite Padlock Probe
  misc_feature 95, 96, 97, 98, 99, 100: n = A,T,C or G
gactggaagagcactgttaacccgacgcacgtaaaaacctaaaaacgttggaggctcatcgttcctattcaggcagatgttatcgaggtccgacnnnnnncgtcaaaccactccttaaataaaaccgatcggatacgcatgaggct

SEQ ID NO: 1607 - DNA, 146 bp, Artificial Sequence
  Bisulfite Padlock Probe
  misc_feature 95, 96, 97, 98, 99, 100: n = A,T,C or G
gactggaagagcactgttaaccctaaaaacgccgacaaaacctaacgttggaggctcatcgttcctattcaggcagatgttatcgaggtccgacnnnnnngcaccaccatccattcgaccaaaaaagatcggatacgcatgaggct

SEQ ID NO: 1608 - DNA, 146 bp, Artificial Sequence
  Bisulfite Padlock Probe
  misc_feature 95, 96, 97, 98, 99, 100: n = A,T,C or G
gactggaagagcactgttaaccctaaaaacgccgacgaaacctaacgttggaggctcatcgttcctattcaggcagatgttatcgaggtccgacnnnnnngcaccaccatccattcgaccgaaaaagatcggatacgcatgaggct

SEQ ID NO: 1609 - DNA, 146 bp, Artificial Sequence
  Bisulfite Padlock Probe
  misc_feature 93, 94, 95, 96, 97, 98: n = A,T,C or G
gactggaagagcactgttaaccctaaaatcctctaaaactacacgttggaggctcatcgttcctattcaggcagatgttatcgaggtccgacnnnnnnaaaaccccttctacttcactctcaactcgatcggatacgcatgaggct

SEQ ID NO: 1610 - DNA, 146 bp, Artificial Sequence
  Bisulfite Padlock Probe
  misc_feature 93, 94, 95, 96, 97, 98: n = A,T,C or G
gactggaagagcactgttaaccctaaaatcctctaaaactacacgttggaggctcatcgttcctattcaggcagatgttatcgaggtccgacnnnnnnaaaaccccttctacttcgctctcaactcgatcggatacgcatgaggct

SEQ ID NO: 1611 - DNA, 146 bp, Artificial Sequence
  Bisulfite Padlock Probe
  misc_feature 92, 93, 94, 95, 96, 97: n = A,T,C or G
gactggaagagcactgttaaccctaaacgaaatcaaacaaatcgttggaggctcatcgttcctattcaggcagatgttatcgaggtccgacnnnnnnaaaaacgtatcgaacaaaattctcaataagatcggatacgcatgaggct

SEQ ID NO: 1612 - DNA, 146 bp, Artificial Sequence
  Bisulfite Padlock Probe
  misc_feature 92, 93, 94, 95, 96, 97: n = A,T,C or G
gactggaagagcactgttaaccctaaacgaaatcaaacgaatcgttggaggctcatcgttcctattcaggcagatgttatcgaggtccgacnnnnnnaaaaacgtatcgaacaaaattctcgataagatcggatacgcatgaggct

SEQ ID NO: 1613 - DNA, 146 bp, Artificial Sequence
  Bisulfite Padlock Probe
  misc_feature 92, 93, 94, 95, 96, 97: n = A,T,C or G
gactggaagagcactgttaaccctaatccccatcgccaactacgttggaggctcatcgttcctattcaggcagatgttatcgaggtccgacnnnnnnaaaaacaaaataaccaatatacaaaacccgatcggatacgcatgaggct

SEQ ID NO: 1614 - DNA, 146 bp, Artificial Sequence
  Bisulfite Padlock Probe
  misc_feature 92, 93, 94, 95, 96, 97: n = A,T,C or G
gactggaagagcactgttaaccctaatccccatcgccgactacgttggaggctcatcgttcctattcaggcagatgttatcgaggtccgacnnnnnnaaaaacgaaataaccaatatacaaaacccgatcggatacgcatgaggct

SEQ ID NO: 1615 - DNA, 146 bp, Artificial Sequence
  Bisulfite Padlock Probe
  misc_feature 95, 96, 97, 98, 99, 100: n = A,T,C or G
gactggaagagcactgttaaccctacctattcctcaacaaccccacgttggaggctcatcgttcctattcaggcagatgttatcgaggtccgacnnnnnnctaccccaaccaatacctatctcctagatcggatacgcatgaggct

SEQ ID NO: 1616 - DNA, 146 bp, Artificial Sequence
  Bisulfite Padlock Probe
  misc_feature 95, 96, 97, 98, 99, 100: n = A,T,C or G
gactggaagagcactgttaaccctacctattcctcaacaaccccacgttggaggctcatcgttcctattcaggcagatgttatcgaggtccgacnnnnnnctaccccgaccaatacctatctcctagatcggatacgcatgaggct

SEQ ID NO: 1617 - DNA, 146 bp, Artificial Sequence
  Bisulfite Padlock Probe
  misc_feature 92, 93, 94, 95, 96, 97: n = A,T,C or G
gactggaagagcactgttaaccctacgaacataaccacccaccgttggaggctcatcgttcctattcaggcagatgttatcgaggtccgacnnnnnncgaacgaaaccaatcataaacaaaaactcgatcggatacgcatgaggct

SEQ ID NO: 1618 - DNA, 146 bp, Artificial Sequence
  Bisulfite Padlock Probe
  misc_feature 92, 93, 94, 95, 96, 97: n = A,T,C or G
gactggaagagcactgttaaccctacgaacgtaaccacccaccgttggaggctcatcgttcctattcaggcagatgttatcgaggtccgacnnnnnncgaacgaaaccaatcataaacgaaaactcgatcggatacgcatgaggct

SEQ ID NO: 1619 - DNA, 146 bp, Artificial Sequence
  Bisulfite Padlock Probe
  misc_feature 93, 94, 95, 96, 97, 98: n = A,T,C or G
gactggaagagcactgttaaccctacgcataatacacccaaattgttggaggctcatcgttcctattcaggcagatgttatcgaggtccgacnnnnnnaaaaacgactcctacgctcaaaaaccaagatcggatacgcatgaggct

SEQ ID NO: 1620 - DNA, 146 bp, Artificial Sequence
  Bisulfite Padlock Probe
  misc_feature 93, 94, 95, 96, 97, 98: n = A,T,C or G
gactggaagagcactgttaaccctacgcataatacgcccaaattgttggaggctcatcgttcctattcaggcagatgttatcgaggtccgacnnnnnnaaaaacgactcctacgctcgaaaaccaagatcggatacgcatgaggct

SEQ ID NO: 1621 - DNA, 146 bp, Artificial Sequence
  Bisulfite Padlock Probe
  misc_feature 92, 93, 94, 95, 96, 97: n = A,T,C or G
gactggaagagcactgttaaccctataaactaaacccataaacgttggaggctcatcgttcctattcaggcagatgttatcgaggtccgacnnnnnnccacacgaaaatacgcatcaccatcaaaagatcggatacgcatgaggct

SEQ ID NO: 1622 - DNA, 146 bp, Artificial Sequence
  Bisulfite Padlock Probe
  misc_feature 92, 93, 94, 95, 96, 97: n = A,T,C or G
gactggaagagcactgttaaccctataaactaaacccgtaaacgttggaggctcatcgttcctattcaggcagatgttatcgaggtccgacnnnnnnccacacgaaaatacgcatcgccatcaaaagatcggatacgcatgaggct

SEQ ID NO: 1623 - DNA, 146 bp, Artificial Sequence
  Bisulfite Padlock Probe
  misc_feature 92, 93, 94, 95, 96, 97: n = A,T,C or G
gactggaagagcactgttaaccgaaaccgaattcaaacaactcgttggaggctcatcgttcctattcaggcagatgttatcgaggtccgacnnnnnnaataaaaatccgctaacatctctcataccgatcggatacgcatgaggct

SEQ ID NO: 1624 - DNA, 146 bp, Artificial Sequence
  Bisulfite Padlock Probe
  misc_feature 92, 93, 94, 95, 96, 97: n = A,T,C or G
gactggaagagcactgttaaccgaaaccgaattcgaacaactcgttggaggctcatcgttcctattcaggcagatgttatcgaggtccgacnnnnnnaataaaaatccgctaacatctctcgtaccgatcggatacgcatgaggct

SEQ ID NO: 1625 - DNA, 146 bp, Artificial Sequence
  Bisulfite Padlock Probe
  misc_feature 92, 93, 94, 95, 96, 97: n = A,T,C or G
gactggaagagcactgttaaccgaaaccgacaaatcctaaaaagttggaggctcatcgttcctattcaggcagatgttatcgaggtccgacnnnnnnaaaaacgctaacgacgcaacttacactacgatcggatacgcatgaggct

SEQ ID NO: 1626 - DNA, 146 bp, Artificial Sequence
  Bisulfite Padlock Probe
  misc_feature 92, 93, 94, 95, 96, 97: n = A,T,C or G
gactggaagagcactgttaaccgaaaccgacgaatcctaaaaagttggaggctcatcgttcctattcaggcagatgttatcgaggtccgacnnnnnnaaaaacgctaacgacgcaacttacgctacgatcggatacgcatgaggct

SEQ ID NO: 1627 - DNA, 146 bp, Artificial Sequence
  Bisulfite Padlock Probe
  misc_feature 95, 96, 97, 98, 99, 100: n = A,T,C or G
gactggaagagcactgttaaccgaaatcttcaaaaccaacatttatgttggaggctcatcgttcctattcaggcagatgttatcgaggtccgacnnnnnnactcccttctcaccttacccaataccgatcggatacgcatgaggct

SEQ ID NO: 1628 - DNA, 146 bp, Artificial Sequence
  Bisulfite Padlock Probe
  misc_feature 95, 96, 97, 98, 99, 100: n = A,T,C or G
gactggaagagcactgttaaccgaaatcttcgaaaccaacatttatgttggaggctcatcgttcctattcaggcagatgttatcgaggtccgacnnnnnnactcccttctcaccttacccgataccgatcggatacgcatgaggct

SEQ ID NO: 1629 - DNA, 146 bp, Artificial Sequence
  Bisulfite Padlock Probe
  misc_feature 92, 93, 94, 95, 96, 97: n = A,T,C or G
gactggaagagcactgttaaccgaaccgctaatacacataaacgttggaggctcatcgttcctattcaggcagatgttatcgaggtccgacnnnnnnaaataaaataatccaatcgataaacacttgatcggatacgcatgaggct

SEQ ID NO: 1630 - DNA, 146 bp, Artificial Sequence
  Bisulfite Padlock Probe
  misc_feature 92, 93, 94, 95, 96, 97: n = A,T,C or G
gactggaagagcactgttaaccgaaccgctaatacgcataaacgttggaggctcatcgttcctattcaggcagatgttatcgaggtccgacnnnnnnaaataaaataatccaatcgataaacgcttgatcggatacgcatgaggct

SEQ ID NO: 1631 - DNA, 146 bp, Artificial Sequence
  Bisulfite Padlock Probe
  misc_feature 92, 93, 94, 95, 96, 97: n = A,T,C or G
gactggaagagcactgttaaccgaatacgaaccgcaacataccgttggaggctcatcgttcctattcaggcagatgttatcgaggtccgacnnnnnnctctctctctctccctaccccacaaaatcgatcggatacgcatgaggct

SEQ ID NO: 1632 - DNA, 146 bp, Artificial Sequence
  Bisulfite Padlock Probe
  misc_feature 92, 93, 94, 95, 96, 97: n = A,T,C or G
gactggaagagcactgttaaccgaatacgaaccgcaacgtaccgttggaggctcatcgttcctattcaggcagatgttatcgaggtccgacnnnnnnctctctctctctccctaccccgcaaaatcgatcggatacgcatgaggct

SEQ ID NO: 1633 - DNA, 146 bp, Artificial Sequence
  Bisulfite Padlock Probe
  misc_feature 92, 93, 94, 95, 96, 97: n = A,T,C or G
gactggaagagcactgttaaccgacaataatacaactcactccgttggaggctcatcgttcctattcaggcagatgttatcgaggtccgacnnnnnntctacttataaaaaccatttacacatattgatcggatacgcatgaggct

SEQ ID NO: 1634 - DNA, 146 bp, Artificial Sequence
  Bisulfite Padlock Probe
  misc_feature 92, 93, 94, 95, 96, 97: n = A,T,C or G
gactggaagagcactgttaaccgacaataatacgactcactccgttggaggctcatcgttcctattcaggcagatgttatcgaggtccgacnnnnnntctacttataaaaaccatttacacatattgatcggatacgcatgaggct

SEQ ID NO: 1635 - DNA, 146 bp, Artificial Sequence
  Bisulfite Padlock Probe
  misc_feature 93, 94, 95, 96, 97, 98: n = A,T,C or G
gactggaagagcactgttaaccgaccaccaacaacaacaacaacgttggaggctcatcgttcctattcaggcagatgttatcgaggtccgacnnnnnncttacccgtcgaaaaacaaacacaaattgatcggatacgcatgaggct

SEQ ID NO: 1636 - DNA, 146 bp, Artificial Sequence
  Bisulfite Padlock Probe
  misc_feature 93, 94, 95, 96, 97, 98: n = A,T,C or G
gactggaagagcactgttaaccgacctctacataaacaaaatccgttggaggctcatcgttcctattcaggcagatgttatcgaggtccgacnnnnnncaaacccgacaactccttaataaaaattgatcggatacgcatgaggct

SEQ ID NO: 1637 - DNA, 146 bp, Artificial Sequence
  Bisulfite Padlock Probe
  misc_feature 93, 94, 95, 96, 97, 98: n = A,T,C or G
gactggaagagcactgttaaccgacctctacataaacgaaatccgttggaggctcatcgttcctattcaggcagatgttatcgaggtccgacnnnnnncaaacccgacgactccttaataaaaattgatcggatacgcatgaggct

SEQ ID NO: 1638 - DNA, 146 bp, Artificial Sequence
  Bisulfite Padlock Probe
  misc_feature 96, 97, 98, 99, 100, 101: n = A,T,C or G
gactggaagagcactgttaaccgacgtccaaacgactccaaatactagttggaggctcatcgttcctattcaggcagatgttatcgaggtccgacnnnnnnatacaaccactcgacccaaacacccgatcggatacgcatgaggct

SEQ ID NO: 1639 - DNA, 146 bp, Artificial Sequence
  Bisulfite Padlock Probe
  misc_feature 96, 97, 98, 99, 100, 101: n = A,T,C or G
gactggaagagcactgttaaccgacgtccaaacgactccgaatactagttggaggctcatcgttcctattcaggcagatgttatcgaggtccgacnnnnnnatacaaccactcgacccgaacacccgatcggatacgcatgaggct

SEQ ID NO: 1640 - DNA, 146 bp, Artificial Sequence
  Bisulfite Padlock Probe
  misc_feature 93, 94, 95, 96, 97, 98: n = A,T,C or G
gactggaagagcactgttaaccgcaaaaatactaaacgacaatcgttggaggctcatcgttcctattcaggcagatgttatcgaggtccgacnnnnnncctcctccgaatccaaaccacaaaaattgatcggatacgcatgaggct

SEQ ID NO: 1641 - DNA, 146 bp, Artificial Sequence
  Bisulfite Padlock Probe
  misc_feature 93, 94, 95, 96, 97, 98: n = A,T,C or G
gactggaagagcactgttaaccgcaaaaatactaaacgacgatcgttggaggctcatcgttcctattcaggcagatgttatcgaggtccgacnnnnnncctcctccgaatccaaaccgcaaaaattgatcggatacgcatgaggct

SEQ ID NO: 1642 - DNA, 146 bp, Artificial Sequence
  Bisulfite Padlock Probe
  misc_feature 96, 97, 98, 99, 100, 101: n = A,T,C or G
gactggaagagcactgttaaccgcgaaccactaaacctatcataaaagttggaggctcatcgttcctattcaggcagatgttatcgaggtccgacnnnnnnaaaacactcccttccccctcctctcgatcggatacgcatgaggct

SEQ ID NO: 1643 - DNA, 146 bp, Artificial Sequence
  Bisulfite Padlock Probe
  misc_feature 96, 97, 98, 99, 100, 101: n = A,T,C or G
gactggaagagcactgttaaccgcgaaccgctaaacctatcataaaagttggaggctcatcgttcctattcaggcagatgttatcgaggtccgacnnnnnnaaaacactcccttccccctcctctcgatcggatacgcatgaggct

SEQ ID NO: 1644 - DNA, 146 bp, Artificial Sequence
  Bisulfite Padlock Probe
  misc_feature 96, 97, 98, 99, 100, 101: n = A,T,C or G
gactggaagagcactgttaaccgcgataaccgcaacaaaataaaaacgttggaggctcatcgttcctattcaggcagatgttatcgaggtccgacnnnnnnaaaaacgaacgaacaaaaactaaaagatcggatacgcatgaggct

SEQ ID NO: 1645 - DNA, 146 bp, Artificial Sequence
  Bisulfite Padlock Probe
  misc_feature 96, 97, 98, 99, 100, 101: n = A,T,C or G
gactggaagagcactgttaaccgcgataaccgcaacgaaataaaaacgttggaggctcatcgttcctattcaggcagatgttatcgaggtccgacnnnnnnaaaaacgaacgaacgaaaactaaaagatcggatacgcatgaggct

SEQ ID NO: 1646 - DNA, 146 bp, Artificial Sequence
  Bisulfite Padlock Probe
  misc_feature 96, 97, 98, 99, 100, 101: n = A,T,C or G
gactggaagagcactgttaaccgcgcgctatacaaaaataaccataagttggaggctcatcgttcctattcaggcagatgttatcgaggtccgacnnnnnncaacctaacgcaacccaaccaaaccgatcggatacgcatgaggct

SEQ ID NO: 1647 - DNA, 146 bp, Artificial Sequence
  Bisulfite Padlock Probe
  misc_feature 96, 97, 98, 99, 100, 101: n = A,T,C or G
gactggaagagcactgttaaccgcgcgctatacaaaaataaccgtaagttggaggctcatcgttcctattcaggcagatgttatcgaggtccgacnnnnnncaacctaacgcaacccgaccaaaccgatcggatacgcatgaggct

SEQ ID NO: 1648 - DNA, 146 bp, Artificial Sequence
  Bisulfite Padlock Probe
  misc_feature 93, 94, 95, 96, 97, 98: n = A,T,C or G
gactggaagagcactgttaaccgctatccccaataccctaaaaagttggaggctcatcgttcctattcaggcagatgttatcgaggtccgacnnnnnntaaatcccacgcccttcataaaattttcgatcggatacgcatgaggct

SEQ ID NO: 1649 - DNA, 146 bp, Artificial Sequence
  Bisulfite Padlock Probe
  misc_feature 93, 94, 95, 96, 97, 98: n = A,T,C or G
gactggaagagcactgttaaccgctatccccgataccctaaaaagttggaggctcatcgttcctattcaggcagatgttatcgaggtccgacnnnnnntaaatcccacgcccttcgtaaaattttcgatcggatacgcatgaggct

SEQ ID NO: 1650 - DNA, 146 bp, Artificial Sequence
  Bisulfite Padlock Probe
  misc_feature 92, 93, 94, 95, 96, 97: n = A,T,C or G
gactggaagagcactgttaaccgtatactacttctacaacaacgttggaggctcatcgttcctattcaggcagatgttatcgaggtccgacnnnnnnaaacaatctcgaaacgcaaacaaaaacaagatcggatacgcatgaggct

SEQ ID NO: 1651 - DNA, 146 bp, Artificial Sequence
  Bisulfite Padlock Probe
  misc_feature 92, 93, 94, 95, 96, 97: n = A,T,C or G
gactggaagagcactgttaaccgtatactacttctacgacaacgttggaggctcatcgttcctattcaggcagatgttatcgaggtccgacnnnnnnaaacaatctcgaaacgcgaacaaaaacaagatcggatacgcatgaggct

SEQ ID NO: 1652 - DNA, 146 bp, Artificial Sequence
  Bisulfite Padlock Probe
  misc_feature 95, 96, 97, 98, 99, 100: n = A,T,C or G
gactggaagagcactgttaaccgttcaaaaaacaataaaaacaaacgttggaggctcatcgttcctattcaggcagatgttatcgaggtccgacnnnnnntcctaaaactccgaaccgaaaccatcgatcggatacgcatgaggct

SEQ ID NO: 1653 - DNA, 146 bp, Artificial Sequence
  Bisulfite Padlock Probe
  misc_feature 95, 96, 97, 98, 99, 100: n = A,T,C or G
gactggaagagcactgttaaccgttcgaaaaacaataaaaacaaacgttggaggctcatcgttcctattcaggcagatgttatcgaggtccgacnnnnnntcctaaaactccgaaccgaaaccgtcgatcggatacgcatgaggct

SEQ ID NO: 1654 - DNA, 146 bp, Artificial Sequence
  Bisulfite Padlock Probe
  misc_feature 92, 93, 94, 95, 96, 97: n = A,T,C or G
gactggaagagcactgttaacctaaaacaactatcaatacaaagttggaggctcatcgttcctattcaggcagatgttatcgaggtccgacnnnnnntaaaaacaaataactcctaaacccaaaaagatcggatacgcatgaggct

SEQ ID NO: 1655 - DNA, 146 bp, Artificial Sequence
  Bisulfite Padlock Probe
  misc_feature 92, 93, 94, 95, 96, 97: n = A,T,C or G
gactggaagagcactgttaacctaaaacaactatcgatacaaagttggaggctcatcgttcctattcaggcagatgttatcgaggtccgacnnnnnntaaaaacaaataactcctaaacccaaaaagatcggatacgcatgaggct

SEQ ID NO: 1656 - DNA, 146 bp, Artificial Sequence
  Bisulfite Padlock Probe
  misc_feature 94, 95, 96, 97, 98, 99: n = A,T,C or G
gactggaagagcactgttaacctaacactaaacaaataactccccgttggaggctcatcgttcctattcaggcagatgttatcgaggtccgacnnnnnnaaaaactttttcatactccactaaaaagatcggatacgcatgaggct

SEQ ID NO: 1657 - DNA, 146 bp, Artificial Sequence
  Bisulfite Padlock Probe
  misc_feature 93, 94, 95, 96, 97, 98: n = A,T,C or G
gactggaagagcactgttaacctaaccctcgcacgaatcaaaacgttggaggctcatcgttcctattcaggcagatgttatcgaggtccgacnnnnnnaatacgactctcaaaacccttatcccccgatcggatacgcatgaggct

SEQ ID NO: 1658 - DNA, 146 bp, Artificial Sequence
  Bisulfite Padlock Probe
  misc_feature 93, 94, 95, 96, 97, 98: n = A,T,C or G
gactggaagagcactgttaacctaaccctcgcacgaatcgaaacgttggaggctcatcgttcctattcaggcagatgttatcgaggtccgacnnnnnnaatacgactctcgaaacccttatcccccgatcggatacgcatgaggct

SEQ ID NO: 1659 - DNA, 146 bp, Artificial Sequence
  Bisulfite Padlock Probe
  misc_feature 94, 95, 96, 97, 98, 99: n = A,T,C or G
gactggaagagcactgttaacctaacgcaacaaaaccaaactttcgttggaggctcatcgttcctattcaggcagatgttatcgaggtccgacnnnnnnctaccgcccgaaaacgactcaaaaaacgatcggatacgcatgaggct

SEQ ID NO: 1660 - DNA, 146 bp, Artificial Sequence
  Bisulfite Padlock Probe
  misc_feature 94, 95, 96, 97, 98, 99: n = A,T,C or G
gactggaagagcactgttaacctaacgcaacaaaaccgaactttcgttggaggctcatcgttcctattcaggcagatgttatcgaggtccgacnnnnnnctaccgcccgaaaacgactcgaaaaacgatcggatacgcatgaggct

SEQ ID NO: 1661 - DNA, 146 bp, Artificial Sequence
  Bisulfite Padlock Probe
  misc_feature 94, 95, 96, 97, 98, 99: n = A,T,C or G
gactggaagagcactgttaacctaacgctaaacaaataactccccgttggaggctcatcgttcctattcaggcagatgttatcgaggtccgacnnnnnnaaaaactttttcatactccgctaaaaagatcggatacgcatgaggct

SEQ ID NO: 1662 - DNA, 146 bp, Artificial Sequence
  Bisulfite Padlock Probe
  misc_feature 92, 93, 94, 95, 96, 97: n = A,T,C or G
gactggaagagcactgttaacctaacttatacaactctataaagttggaggctcatcgttcctattcaggcagatgttatcgaggtccgacnnnnnnactatccttctcccccaccatcccaaaaagatcggatacgcatgaggct

SEQ ID NO: 1663 - DNA, 146 bp, Artificial Sequence
  Bisulfite Padlock Probe
  misc_feature 92, 93, 94, 95, 96, 97: n = A,T,C or G
gactggaagagcactgttaacctaatatacaaacaaccccttcgttggaggctcatcgttcctattcaggcagatgttatcgaggtccgacnnnnnntaaaaacctaaaatcacctaaaatccaaagatcggatacgcatgaggct

SEQ ID NO: 1664 - DNA, 146 bp, Artificial Sequence
  Bisulfite Padlock Probe
  misc_feature 92, 93, 94, 95, 96, 97: n = A,T,C or G
gactggaagagcactgttaacctaatatacgaacaaccccttcgttggaggctcatcgttcctattcaggcagatgttatcgaggtccgacnnnnnntaaaaacctaaaatcacctaaaatccaaagatcggatacgcatgaggct

SEQ ID NO: 1665 - DNA, 146 bp, Artificial Sequence
  Bisulfite Padlock Probe
  misc_feature 94, 95, 96, 97, 98, 99: n = A,T,C or G
gactggaagagcactgttaacctaatccataatacaaaccaactcgttggaggctcatcgttcctattcaggcagatgttatcgaggtccgacnnnnnncacctactccccgcacaaacaacaaatgatcggatacgcatgaggct

SEQ ID NO: 1666 - DNA, 146 bp, Artificial Sequence
  Bisulfite Padlock Probe
  misc_feature 94, 95, 96, 97, 98, 99: n = A,T,C or G
gactggaagagcactgttaacctaatccataatacaaaccgactcgttggaggctcatcgttcctattcaggcagatgttatcgaggtccgacnnnnnncacctactccccgcacaaacgacaaatgatcggatacgcatgaggct

SEQ ID NO: 1667 - DNA, 146 bp, Artificial Sequence
  Bisulfite Padlock Probe
  misc_feature 96, 97, 98, 99, 100, 101: n = A,T,C or G
gactggaagagcactgttaacctacgaaatccttaaacaaatcaaacgttggaggctcatcgttcctattcaggcagatgttatcgaggtccgacnnnnnnaaaaaccgatacgccgaaatcaaccgatcggatacgcatgaggct

SEQ ID NO: 1668 - DNA, 146 bp, Artificial Sequence
  Bisulfite Padlock Probe
  misc_feature 96, 97, 98, 99, 100, 101: n = A,T,C or G
gactggaagagcactgttaacctacgaaatccttaaacaaatcgaacgttggaggctcatcgttcctattcaggcagatgttatcgaggtccgacnnnnnnaaaaaccgatacgccgaaatcgaccgatcggatacgcatgaggct

SEQ ID NO: 1669 - DNA, 146 bp, Artificial Sequence
  Bisulfite Padlock Probe
  misc_feature 93, 94, 95, 96, 97, 98: n = A,T,C or G
gactggaagagcactgttaacctacgacaacttataattcttaagttggaggctcatcgttcctattcaggcagatgttatcgaggtccgacnnnnnncaatccccgaaaacgaccaaatccaactgatcggatacgcatgaggct

SEQ ID NO: 1670 - DNA, 146 bp, Artificial Sequence
  Bisulfite Padlock Probe
  misc_feature 93, 94, 95, 96, 97, 98: n = A,T,C or G
gactggaagagcactgttaacctacgacgacttataattcttaagttggaggctcatcgttcctattcaggcagatgttatcgaggtccgacnnnnnncaatccccgaaaacgaccaaatccgactgatcggatacgcatgaggct

SEQ ID NO: 1671 - DNA, 146 bp, Artificial Sequence
  Bisulfite Padlock Probe
  misc_feature 96, 97, 98, 99, 100, 101: n = A,T,C or G
gactggaagagcactgttaacctataaccgaaatctctccaccaaccgttggaggctcatcgttcctattcaggcagatgttatcgaggtccgacnnnnnnctacaatactaacccaataaaaaccgatcggatacgcatgaggct

SEQ ID NO: 1672 - DNA, 146 bp, Artificial Sequence
  Bisulfite Padlock Probe
  misc_feature 96, 97, 98, 99, 100, 101: n = A,T,C or G
gactggaagagcactgttaacctataaccgaaatctctccgccaaccgttggaggctcatcgttcctattcaggcagatgttatcgaggtccgacnnnnnnctacaatactaacccgataaaaaccgatcggatacgcatgaggct

SEQ ID NO: 1673 - DNA, 146 bp, Artificial Sequence
  Bisulfite Padlock Probe
  misc_feature 96, 97, 98, 99, 100, 101: n = A,T,C or G
gactggaagagcactgttaacctatcaacaaccacccaactactcccgttggaggctcatcgttcctattcaggcagatgttatcgaggtccgacnnnnnntcaacaatcaacaaaaataaaaatagatcggatacgcatgaggct

SEQ ID NO: 1674 - DNA, 146 bp, Artificial Sequence
  Bisulfite Padlock Probe
  misc_feature 96, 97, 98, 99, 100, 101: n = A,T,C or G
gactggaagagcactgttaacctatcaacgaccacccaactactcccgttggaggctcatcgttcctattcaggcagatgttatcgaggtccgacnnnnnntcaacaatcaacgaaaataaaaatagatcggatacgcatgaggct

SEQ ID NO: 1675 - DNA, 146 bp, Artificial Sequence
  Bisulfite Padlock Probe
  misc_feature 92, 93, 94, 95, 96, 97: n = A,T,C or G
gactggaagagcactgttaacctcaaaaccaaacctaaaaatcgttggaggctcatcgttcctattcaggcagatgttatcgaggtccgacnnnnnnaaaaacccgaaacctatccatctctatccgatcggatacgcatgaggct

SEQ ID NO: 1676 - DNA, 146 bp, Artificial Sequence
  Bisulfite Padlock Probe
  misc_feature 92, 93, 94, 95, 96, 97: n = A,T,C or G
gactggaagagcactgttaacctcaaaaccgaacctaaaaatcgttggaggctcatcgttcctattcaggcagatgttatcgaggtccgacnnnnnnaaaaacccgaaacctatccgtctctatccgatcggatacgcatgaggct

SEQ ID NO: 1677 - DNA, 146 bp, Artificial Sequence
  Bisulfite Padlock Probe
  misc_feature 92, 93, 94, 95, 96, 97: n = A,T,C or G
gactggaagagcactgttaacctcaaccaccccaaccccaatcgttggaggctcatcgttcctattcaggcagatgttatcgaggtccgacnnnnnncgctaccctcaactcaatcccaattaaacgatcggatacgcatgaggct

SEQ ID NO: 1678 - DNA, 146 bp, Artificial Sequence
  Bisulfite Padlock Probe
  misc_feature 92, 93, 94, 95, 96, 97: n = A,T,C or G
gactggaagagcactgttaacctcaaccaccccaaccccaatcgttggaggctcatcgttcctattcaggcagatgttatcgaggtccgacnnnnnncgctaccctcgactcaatcccaattaaacgatcggatacgcatgaggct

SEQ ID NO: 1679 - DNA, 146 bp, Artificial Sequence
  Bisulfite Padlock Probe
  misc_feature 94, 95, 96, 97, 98, 99: n = A,T,C or G
gactggaagagcactgttaacctcaacctcactaaaccaaatcctgttggaggctcatcgttcctattcaggcagatgttatcgaggtccgacnnnnnnaaccccaaccctaaaccacctcaaaccgatcggatacgcatgaggct

SEQ ID NO: 1680 - DNA, 146 bp, Artificial Sequence
  Bisulfite Padlock Probe
  misc_feature 92, 93, 94, 95, 96, 97: n = A,T,C or G
gactggaagagcactgttaacctcatctccactcccctccctcgttggaggctcatcgttcctattcaggcagatgttatcgaggtccgacnnnnnntatatacctaaatcctaaaaactatactagatcggatacgcatgaggct

SEQ ID NO: 1681 - DNA, 146 bp, Artificial Sequence
  Bisulfite Padlock Probe
  misc_feature 96, 97, 98, 99, 100, 101: n = A,T,C or G
gactggaagagcactgttaacctccacacccccaactcaaataaaaagttggaggctcatcgttcctattcaggcagatgttatcgaggtccgacnnnnnncaaaaacccccaaacccaaccaaccgatcggatacgcatgaggct

SEQ ID NO: 1682 - DNA, 146 bp, Artificial Sequence
  Bisulfite Padlock Probe
  misc_feature 94, 95, 96, 97, 98, 99: n = A,T,C or G
gactggaagagcactgttaacctcccacaataaatcccaaaaaacgttggaggctcatcgttcctattcaggcagatgttatcgaggtccgacnnnnnnaaaaactaatccacgtaaactcaatttgatcggatacgcatgaggct

SEQ ID NO: 1683 - DNA, 146 bp, Artificial Sequence
  Bisulfite Padlock Probe
  misc_feature 94, 95, 96, 97, 98, 99: n = A,T,C or G
gactggaagagcactgttaacctcccacaataaatcccgaaaaacgttggaggctcatcgttcctattcaggcagatgttatcgaggtccgacnnnnnnaaaaactaatccacgtaaactcgatttgatcggatacgcatgaggct

SEQ ID NO: 1684 - DNA, 146 bp, Artificial Sequence
  Bisulfite Padlock Probe
  misc_feature 94, 95, 96, 97, 98, 99: n = A,T,C or G
gactggaagagcactgttaacctcccaccctctctcttactaaccgttggaggctcatcgttcctattcaggcagatgttatcgaggtccgacnnnnnntcctcaatcccaatctctcccttactcgatcggatacgcatgaggct

SEQ ID NO: 1685 - DNA, 146 bp, Artificial Sequence
  Bisulfite Padlock Probe
  misc_feature 94, 95, 96, 97, 98, 99: n = A,T,C or G
gactggaagagcactgttaacctccccaaactacctcctaaaaatgttggaggctcatcgttcctattcaggcagatgttatcgaggtccgacnnnnnnaactcctaccaacccccaactactcccgatcggatacgcatgaggct

SEQ ID NO: 1686 - DNA, 146 bp, Artificial Sequence
  Bisulfite Padlock Probe
  misc_feature 94, 95, 96, 97, 98, 99: n = A,T,C or G
gactggaagagcactgttaacctcccgccctctctcttactaaccgttggaggctcatcgttcctattcaggcagatgttatcgaggtccgacnnnnnntcctcaatcccgatctctcccttactcgatcggatacgcatgaggct

SEQ ID NO: 1687 - DNA, 146 bp, Artificial Sequence
  Bisulfite Padlock Probe
  misc_feature 92, 93, 94, 95, 96, 97: n = A,T,C or G
gactggaagagcactgttaacctccgacccaaatttctaaaaagttggaggctcatcgttcctattcaggcagatgttatcgaggtccgacnnnnnnccacattattatccaattctatctaataagatcggatacgcatgaggct

SEQ ID NO: 1688 - DNA, 146 bp, Artificial Sequence
  Bisulfite Padlock Probe
  misc_feature 92, 93, 94, 95, 96, 97: n = A,T,C or G
gactggaagagcactgttaacctccgacccgaatttctaaaaagttggaggctcatcgttcctattcaggcagatgttatcgaggtccgacnnnnnnccacattattatccaattctatctaataagatcggatacgcatgaggct

SEQ ID NO: 1689 - DNA, 146 bp, Artificial Sequence
  Bisulfite Padlock Probe
  misc_feature 96, 97, 98, 99, 100, 101: n = A,T,C or G
gactggaagagcactgttaacctccgcacccccaactcaaataaaaagttggaggctcatcgttcctattcaggcagatgttatcgaggtccgacnnnnnncaaaaacccccaaacccaaccgaccgatcggatacgcatgaggct

SEQ ID NO: 1690 - DNA, 146 bp, Artificial Sequence
  Bisulfite Padlock Probe
  misc_feature 92, 93, 94, 95, 96, 97: n = A,T,C or G
gactggaagagcactgttaacctcctctaataaaatcattcaagttggaggctcatcgttcctattcaggcagatgttatcgaggtccgacnnnnnnaataaatacctaaaccataacccctcacagatcggatacgcatgaggct

SEQ ID NO: 1691 - DNA, 146 bp, Artificial Sequence
  Bisulfite Padlock Probe
  misc_feature 92, 93, 94, 95, 96, 97: n = A,T,C or G
gactggaagagcactgttaacctcctctaataaaatcattcaagttggaggctcatcgttcctattcaggcagatgttatcgaggtccgacnnnnnnaataaatacctaaaccgtaacccctcacagatcggatacgcatgaggct

SEQ ID NO: 1692 - DNA, 146 bp, Artificial Sequence
  Bisulfite Padlock Probe
  misc_feature 92, 93, 94, 95, 96, 97: n = A,T,C or G
gactggaagagcactgttaacctcctctctaacctttaatccagttggaggctcatcgttcctattcaggcagatgttatcgaggtccgacnnnnnntccctaaaaacaaaacccattcaaattttgatcggatacgcatgaggct

SEQ ID NO: 1693 - DNA, 146 bp, Artificial Sequence
  Bisulfite Padlock Probe
  misc_feature 92, 93, 94, 95, 96, 97: n = A,T,C or G
gactggaagagcactgttaacctcgaaaacaccaaaaacttacgttggaggctcatcgttcctattcaggcagatgttatcgaggtccgacnnnnnnactcaaactaaccctatactttaaaatacgatcggatacgcatgaggct

SEQ ID NO: 1694 - DNA, 146 bp, Artificial Sequence
  Bisulfite Padlock Probe
  misc_feature 92, 93, 94, 95, 96, 97: n = A,T,C or G
gactggaagagcactgttaacctcgaaaacaccgaaaacttacgttggaggctcatcgttcctattcaggcagatgttatcgaggtccgacnnnnnnactcaaactaaccctatactttaaaatacgatcggatacgcatgaggct

SEQ ID NO: 1695 - DNA, 146 bp, Artificial Sequence
  Bisulfite Padlock Probe
  misc_feature 94, 95, 96, 97, 98, 99: n = A,T,C or G
gactggaagagcactgttaacctcgacctcactaaaccaaatcctgttggaggctcatcgttcctattcaggcagatgttatcgaggtccgacnnnnnngaccccaaccctaaaccacctcaaaccgatcggatacgcatgaggct

SEQ ID NO: 1696 - DNA, 146 bp, Artificial Sequence
  Bisulfite Padlock Probe
  misc_feature 96, 97, 98, 99, 100, 101: n = A,T,C or G
gactggaagagcactgttaaccttaaaaataacccgaaacaaactccgttggaggctcatcgttcctattcaggcagatgttatcgaggtccgacnnnnnnaaaaactatctaaaaacgcaaaaccgatcggatacgcatgaggct

SEQ ID NO: 1697 - DNA, 146 bp, Artificial Sequence
  Bisulfite Padlock Probe
  misc_feature 96, 97, 98, 99, 100, 101: n = A,T,C or G
gactggaagagcactgttaaccttaaaaataacccgaaacgaactccgttggaggctcatcgttcctattcaggcagatgttatcgaggtccgacnnnnnnaaaaactatctaaaaacgcgaaaccgatcggatacgcatgaggct

SEQ ID NO: 1698 - DNA, 146 bp, Artificial Sequence
  Bisulfite Padlock Probe
  misc_feature 93, 94, 95, 96, 97, 98: n = A,T,C or G
gactggaagagcactgttaaccttaaacaacctctcctacctaagttggaggctcatcgttcctattcaggcagatgttatcgaggtccgacnnnnnncaaattcaaaattcaaaatcccaacctcgatcggatacgcatgaggct

SEQ ID NO: 1699 - DNA, 146 bp, Artificial Sequence
  Bisulfite Padlock Probe
  misc_feature 93, 94, 95, 96, 97, 98: n = A,T,C or G
gactggaagagcactgttaaccttaaacaacctctcctacctaagttggaggctcatcgttcctattcaggcagatgttatcgaggtccgacnnnnnncaaattcaaaattcgaaatcccaacctcgatcggatacgcatgaggct

SEQ ID NO: 1700 - DNA, 146 bp, Artificial Sequence
  Bisulfite Padlock Probe
  misc_feature 93, 94, 95, 96, 97, 98: n = A,T,C or G
gactggaagagcactgttaaccttcctacttatctctcccactcgttggaggctcatcgttcctattcaggcagatgttatcgaggtccgacnnnnnnaacccctaaaaccctacctcccaaaaccgatcggatacgcatgaggct

SEQ ID NO: 1701 - DNA, 146 bp, Artificial Sequence
  Bisulfite Padlock Probe
  misc_feature 93, 94, 95, 96, 97, 98: n = A,T,C or G
gactggaagagcactgttaaccttcctacttatctctcccgctcgttggaggctcatcgttcctattcaggcagatgttatcgaggtccgacnnnnnnaacccctaaaaccctacctcccaaaaccgatcggatacgcatgaggct

SEQ ID NO: 1702 - DNA, 146 bp, Artificial Sequence
  Bisulfite Padlock Probe
  misc_feature 93, 94, 95, 96, 97, 98: n = A,T,C or G
gactggaagagcactgttaacgaaaaacctaaaattcttaaaaagttggaggctcatcgttcctattcaggcagatgttatcgaggtccgacnnnnnnacccgctctatattcgtcttaacctctcgatcggatacgcatgaggct

SEQ ID NO: 1703 - DNA, 146 bp, Artificial Sequence
  Bisulfite Padlock Probe
  misc_feature 96, 97, 98, 99, 100, 101: n = A,T,C or G
gactggaagagcactgttaacgaaaaataaacttccataaaaactaagttggaggctcatcgttcctattcaggcagatgttatcgaggtccgacnnnnnnacctcttcgccaaacaaatacaaaagatcggatacgcatgaggct

SEQ ID NO: 1704 - DNA, 146 bp, Artificial Sequence
  Bisulfite Padlock Probe
  misc_feature 93, 94, 95, 96, 97, 98: n = A,T,C or G
gactggaagagcactgttaacgaaaacaacttaaaacatacaccgttggaggctcatcgttcctattcaggcagatgttatcgaggtccgacnnnnnncacccaaaaaccaaaaatccaaacaacagatcggatacgcatgaggct

SEQ ID NO: 1705 - DNA, 146 bp, Artificial Sequence
  Bisulfite Padlock Probe
  misc_feature 93, 94, 95, 96, 97, 98: n = A,T,C or G
gactggaagagcactgttaacgaaaacaacttaaaacatacgccgttggaggctcatcgttcctattcaggcagatgttatcgaggtccgacnnnnnncacccaaaaaccaaaaatccaaacgacagatcggatacgcatgaggct

SEQ ID NO: 1706 - DNA, 146 bp, Artificial Sequence
  Bisulfite Padlock Probe
  misc_feature 93, 94, 95, 96, 97, 98: n = A,T,C or G
gactggaagagcactgttaacgaaaataccaccccaaatactacgttggaggctcatcgttcctattcaggcagatgttatcgaggtccgacnnnnnnaaccaaacaactcgctaaacactaactcgatcggatacgcatgaggct

SEQ ID NO: 1707 - DNA, 146 bp, Artificial Sequence
  Bisulfite Padlock Probe
  misc_feature 93, 94, 95, 96, 97, 98: n = A,T,C or G
gactggaagagcactgttaacgaaaataccgccccaaatactacgttggaggctcatcgttcctattcaggcagatgttatcgaggtccgacnnnnnnaaccaaacaactcgctaaacgctaactcgatcggatacgcatgaggct

SEQ ID NO: 1708 - DNA, 146 bp, Artificial Sequence
  Bisulfite Padlock Probe
  misc_feature 95, 96, 97, 98, 99, 100: n = A,T,C or G
gactggaagagcactgttaacgaacaaaaacccgaaaacgcaatccgttggaggctcatcgttcctattcaggcagatgttatcgaggtccgacnnnnnncgtttacaccccaaaaaccccttaccgatcggatacgcatgaggct

SEQ ID NO: 1709 - DNA, 146 bp, Artificial Sequence
  Bisulfite Padlock Probe
  misc_feature 95, 96, 97, 98, 99, 100: n = A,T,C or G
gactggaagagcactgttaacgaacaaaaacccgaaaacgcgatccgttggaggctcatcgttcctattcaggcagatgttatcgaggtccgacnnnnnncgtttacaccccgaaaaccccttaccgatcggatacgcatgaggct

SEQ ID NO: 1710 - DNA, 146 bp, Artificial Sequence
  Bisulfite Padlock Probe
  misc_feature 92, 93, 94, 95, 96, 97: n = A,T,C or G
gactggaagagcactgttaacgaacctaaaaacaaacaaaaaagttggaggctcatcgttcctattcaggcagatgttatcgaggtccgacnnnnnnaaactaataaaaaccaaaaacacccaaaagatcggatacgcatgaggct

SEQ ID NO: 1711 - DNA, 146 bp, Artificial Sequence
  Bisulfite Padlock Probe
  misc_feature 92, 93, 94, 95, 96, 97: n = A,T,C or G
gactggaagagcactgttaacgaacctaaaaacaaacgaaaaagttggaggctcatcgttcctattcaggcagatgttatcgaggtccgacnnnnnnaaactaataaaaaccaaaaacgcccaaaagatcggatacgcatgaggct

SEQ ID NO: 1712 - DNA, 146 bp, Artificial Sequence
  Bisulfite Padlock Probe
  misc_feature 92, 93, 94, 95, 96, 97: n = A,T,C or G
gactggaagagcactgttaacgaacgtatatttacatatatacgttggaggctcatcgttcctattcaggcagatgttatcgaggtccgacnnnnnnaaaataataatacaaaacgctacgcaaaagatcggatacgcatgaggct

SEQ ID NO: 1713 - DNA, 146 bp, Artificial Sequence
  Bisulfite Padlock Probe
  misc_feature 92, 93, 94, 95, 96, 97: n = A,T,C or G
gactggaagagcactgttaacgaacgtatatttacgtatatacgttggaggctcatcgttcctattcaggcagatgttatcgaggtccgacnnnnnnaaaataataatacaaaacgctacgcgaaagatcggatacgcatgaggct

SEQ ID NO: 1714 - DNA, 146 bp, Artificial Sequence
  Bisulfite Padlock Probe
  misc_feature 92, 93, 94, 95, 96, 97: n = A,T,C or G
gactggaagagcactgttaacgaactcgaatctccacaactacgttggaggctcatcgttcctattcaggcagatgttatcgaggtccgacnnnnnnactccacacactcatacacacacacactcgatcggatacgcatgaggct

SEQ ID NO: 1715 - DNA, 146 bp, Artificial Sequence
  Bisulfite Padlock Probe
  misc_feature 92, 93, 94, 95, 96, 97: n = A,T,C or G
gactggaagagcactgttaacgaactcgaatctccgcaactacgttggaggctcatcgttcctattcaggcagatgttatcgaggtccgacnnnnnnactccacacactcatacacacacacactcgatcggatacgcatgaggct

SEQ ID NO: 1716 - DNA, 146 bp, Artificial Sequence
  Bisulfite Padlock Probe
  misc_feature 95, 96, 97, 98, 99, 100: n = A,T,C or G
gactggaagagcactgttaacgaatctaaaaactatacaaacaaaagttggaggctcatcgttcctattcaggcagatgttatcgaggtccgacnnnnnncaactcctcgtaccccctcaaaaaccgatcggatacgcatgaggct

SEQ ID NO: 1717 - DNA, 146 bp, Artificial Sequence
  Bisulfite Padlock Probe
  misc_feature 95, 96, 97, 98, 99, 100: n = A,T,C or G
gactggaagagcactgttaacgaatctaaaaactatacaaacgaaagttggaggctcatcgttcctattcaggcagatgttatcgaggtccgacnnnnnncaactcctcgtaccccctcgaaaaccgatcggatacgcatgaggct

SEQ ID NO: 1718 - DNA, 146 bp, Artificial Sequence
  Bisulfite Padlock Probe
  misc_feature 93, 94, 95, 96, 97, 98: n = A,T,C or G
gactggaagagcactgttaacgacaaaacccaaacaaaaacatcgttggaggctcatcgttcctattcaggcagatgttatcgaggtccgacnnnnnnaataaaacaaacttaaataacctctaccgatcggatacgcatgaggct

SEQ ID NO: 1719 - DNA, 146 bp, Artificial Sequence
  Bisulfite Padlock Probe
  misc_feature 93, 94, 95, 96, 97, 98: n = A,T,C or G
gactggaagagcactgttaacgacaccgacccatccatttatacgttggaggctcatcgttcctattcaggcagatgttatcgaggtccgacnnnnnnaatcctactcccatcctacttctacaacgatcggatacgcatgaggct

SEQ ID NO: 1720 - DNA, 146 bp, Artificial Sequence
  Bisulfite Padlock Probe
  misc_feature 93, 94, 95, 96, 97, 98: n = A,T,C or G
gactggaagagcactgttaacgacaccgacccatccgtttatacgttggaggctcatcgttcctattcaggcagatgttatcgaggtccgacnnnnnnaatcctactcccatcctacttctacaacgatcggatacgcatgaggct

SEQ ID NO: 1721 - DNA, 146 bp, Artificial Sequence
  Bisulfite Padlock Probe
  misc_feature 94, 95, 96, 97, 98, 99: n = A,T,C or G
gactggaagagcactgttaacgaccacccaccaacaaaccctaacgttggaggctcatcgttcctattcaggcagatgttatcgaggtccgacnnnnnntaaaccgataaaccataccttctccccgatcggatacgcatgaggct

SEQ ID NO: 1722 - DNA, 146 bp, Artificial Sequence
  Bisulfite Padlock Probe
  misc_feature 92, 93, 94, 95, 96, 97: n = A,T,C or G
gactggaagagcactgttaacgacctacactttatcctaacttgttggaggctcatcgttcctattcaggcagatgttatcgaggtccgacnnnnnntactaccttcccttcccatttaaaaactcgatcggatacgcatgaggct

SEQ ID NO: 1723 - DNA, 146 bp, Artificial Sequence
  Bisulfite Padlock Probe
  misc_feature 92, 93, 94, 95, 96, 97: n = A,T,C or G
gactggaagagcactgttaacgacctacgctttatcctaacttgttggaggctcatcgttcctattcaggcagatgttatcgaggtccgacnnnnnntactaccttcccttcccatttaaaaactcgatcggatacgcatgaggct

SEQ ID NO: 1724 - DNA, 146 bp, Artificial Sequence
  Bisulfite Padlock Probe
  misc_feature 93, 94, 95, 96, 97, 98: n = A,T,C or G
gactggaagagcactgttaacgacgaaacccaaacaaaaacatcgttggaggctcatcgttcctattcaggcagatgttatcgaggtccgacnnnnnnaataaaacaaacttaaataacctctaccgatcggatacgcatgaggct

SEQ ID NO: 1725 - DNA, 146 bp, Artificial Sequence
  Bisulfite Padlock Probe
  misc_feature 95, 96, 97, 98, 99, 100: n = A,T,C or G
gactggaagagcactgttaacgacgataaaaacaaacaaacaaaaagttggaggctcatcgttcctattcaggcagatgttatcgaggtccgacnnnnnncaaccacccctactacccacaacctcgatcggatacgcatgaggct

SEQ ID NO: 1726 - DNA, 146 bp, Artificial Sequence
  Bisulfite Padlock Probe
  misc_feature 95, 96, 97, 98, 99, 100: n = A,T,C or G
gactggaagagcactgttaacgacgataaaaacgaacaaacaaaaagttggaggctcatcgttcctattcaggcagatgttatcgaggtccgacnnnnnncaaccacccctactacccacaacctcgatcggatacgcatgaggct

SEQ ID NO: 1727 - DNA, 146 bp, Artificial Sequence
  Bisulfite Padlock Probe
  misc_feature 94, 95, 96, 97, 98, 99: n = A,T,C or G
gactggaagagcactgttaacgatattaccccctcaaaaattaacgttggaggctcatcgttcctattcaggcagatgttatcgaggtccgacnnnnnnaaaaacgaaatacaaccctactaaaacgatcggatacgcatgaggct

SEQ ID NO: 1728 - DNA, 146 bp, Artificial Sequence
  Bisulfite Padlock Probe
  misc_feature 93, 94, 95, 96, 97, 98: n = A,T,C or G
gactggaagagcactgttaacgatcgaatactccactccaaaacgttggaggctcatcgttcctattcaggcagatgttatcgaggtccgacnnnnnntctaaccacttcacccatttcccaaaccgatcggatacgcatgaggct

SEQ ID NO: 1729 - DNA, 146 bp, Artificial Sequence
  Bisulfite Padlock Probe
  misc_feature 93, 94, 95, 96, 97, 98: n = A,T,C or G
gactggaagagcactgttaacgatcgaatactccgctccaaaacgttggaggctcatcgttcctattcaggcagatgttatcgaggtccgacnnnnnntctaaccacttcgcccatttcccaaaccgatcggatacgcatgaggct

SEQ ID NO: 1730 - DNA, 146 bp, Artificial Sequence
  Bisulfite Padlock Probe
  misc_feature 95, 96, 97, 98, 99, 100: n = A,T,C or G
gactggaagagcactgttaacgattaatatccataaacgccgccacgttggaggctcatcgttcctattcaggcagatgttatcgaggtccgacnnnnnnaaccgacccaaaatatcactaataccgatcggatacgcatgaggct

SEQ ID NO: 1731 - DNA, 146 bp, Artificial Sequence
  Bisulfite Padlock Probe
  misc_feature 95, 96, 97, 98, 99, 100: n = A,T,C or G
gactggaagagcactgttaacgattaatatccataaacgccgccgcgttggaggctcatcgttcctattcaggcagatgttatcgaggtccgacnnnnnnaaccgacccaaaatatcgctaataccgatcggatacgcatgaggct

SEQ ID NO: 1732 - DNA, 146 bp, Artificial Sequence
  Bisulfite Padlock Probe
  misc_feature 93, 94, 95, 96, 97, 98: n = A,T,C or G
gactggaagagcactgttaacgattcatcatcttaatccataacgttggaggctcatcgttcctattcaggcagatgttatcgaggtccgacnnnnnnaatctcaatccccatcctaaacccgctcgatcggatacgcatgaggct

SEQ ID NO: 1733 - DNA, 146 bp, Artificial Sequence
  Bisulfite Padlock Probe
  misc_feature 92, 93, 94, 95, 96, 97: n = A,T,C or G
gactggaagagcactgttaacgcaaaatccttacaactaaaaagttggaggctcatcgttcctattcaggcagatgttatcgaggtccgacnnnnnncgaaaaataacccctaacgcccccaatacgatcggatacgcatgaggct

SEQ ID NO: 1734 - DNA, 146 bp, Artificial Sequence
  Bisulfite Padlock Probe
  misc_feature 94, 95, 96, 97, 98, 99: n = A,T,C or G
gactggaagagcactgttaacgccaaaaattaactaaaacatcccgttggaggctcatcgttcctattcaggcagatgttatcgaggtccgacnnnnnnaacaaacacgcaacccgaaacccaaaagatcggatacgcatgaggct

SEQ ID NO: 1735 - DNA, 146 bp, Artificial Sequence
  Bisulfite Padlock Probe
  misc_feature 94, 95, 96, 97, 98, 99: n = A,T,C or G
gactggaagagcactgttaacgcccaaactacgcaacacaataacgttggaggctcatcgttcctattcaggcagatgttatcgaggtccgacnnnnnncttacctcgaccatcctacgaccactagatcggatacgcatgaggct

SEQ ID NO: 1736 - DNA, 146 bp, Artificial Sequence
  Bisulfite Padlock Probe
  misc_feature 94, 95, 96, 97, 98, 99: n = A,T,C or G
gactggaagagcactgttaacgcccaaactacgcaacacgataacgttggaggctcatcgttcctattcaggcagatgttatcgaggtccgacnnnnnncttacctcgaccatcctacgaccgctagatcggatacgcatgaggct

SEQ ID NO: 1737 - DNA, 146 bp, Artificial Sequence
  Bisulfite Padlock Probe
  misc_feature 92, 93, 94, 95, 96, 97: n = A,T,C or G
gactggaagagcactgttaacgccccttaataaaataaccttagttggaggctcatcgttcctattcaggcagatgttatcgaggtccgacnnnnnncccaaacctaaattctatttcttcctattgatcggatacgcatgaggct

SEQ ID NO: 1738 - DNA, 146 bp, Artificial Sequence
  Bisulfite Padlock Probe
  misc_feature 94, 95, 96, 97, 98, 99: n = A,T,C or G
gactggaagagcactgttaacgccctaaacaacgaacaaacaaccgttggaggctcatcgttcctattcaggcagatgttatcgaggtccgacnnnnnnccaacaactaccacaacaacaacacccgatcggatacgcatgaggct

SEQ ID NO: 1739 - DNA, 146 bp, Artificial Sequence
  Bisulfite Padlock Probe
  misc_feature 94, 95, 96, 97, 98, 99: n = A,T,C or G
gactggaagagcactgttaacgccctaaacaacgaacgaacaaccgttggaggctcatcgttcctattcaggcagatgttatcgaggtccgacnnnnnnccaacaactaccacaacaacaacgcccgatcggatacgcatgaggct

SEQ ID NO: 1740 - DNA, 146 bp, Artificial Sequence
  Bisulfite Padlock Probe
  misc_feature 92, 93, 94, 95, 96, 97: n = A,T,C or G
gactggaagagcactgttaacgcctccaaacctaccataacccgttggaggctcatcgttcctattcaggcagatgttatcgaggtccgacnnnnnnaaaaacaacaaaacatacaacaacaaaaagatcggatacgcatgaggct

SEQ ID NO: 1741 - DNA, 146 bp, Artificial Sequence
  Bisulfite Padlock Probe
  misc_feature 92, 93, 94, 95, 96, 97: n = A,T,C or G
gactggaagagcactgttaacgcctccgaacctaccataacccgttggaggctcatcgttcctattcaggcagatgttatcgaggtccgacnnnnnnaaaaacaacaaaacatacaacaacaaaaagatcggatacgcatgaggct

SEQ ID NO: 1742 - DNA, 146 bp, Artificial Sequence
  Bisulfite Padlock Probe
  misc_feature 92, 93, 94, 95, 96, 97: n = A,T,C or G
gactggaagagcactgttaacgccttaaccaaacccaaacaaagttggaggctcatcgttcctattcaggcagatgttatcgaggtccgacnnnnnnctttcaaaataaaatctctaacctcacccgatcggatacgcatgaggct

SEQ ID NO: 1743 - DNA, 146 bp, Artificial Sequence
  Bisulfite Padlock Probe
  misc_feature 96, 97, 98, 99, 100, 101: n = A,T,C or G
gactggaagagcactgttaacgcgccgaaaaacaaaaacaacaaaaagttggaggctcatcgttcctattcaggcagatgttatcgaggtccgacnnnnnngctcctaccgaccacaaacaacttcgatcggatacgcatgaggct

SEQ ID NO: 1744 - DNA, 146 bp, Artificial Sequence
  Bisulfite Padlock Probe
  misc_feature 96, 97, 98, 99, 100, 101: n = A,T,C or G
gactggaagagcactgttaacgcgccgaaaaacgaaaacaacaaaaagttggaggctcatcgttcctattcaggcagatgttatcgaggtccgacnnnnnngctcctaccgaccgcaaacaacttcgatcggatacgcatgaggct

SEQ ID NO: 1745 - DNA, 146 bp, Artificial Sequence
  Bisulfite Padlock Probe
  misc_feature 93, 94, 95, 96, 97, 98: n = A,T,C or G
gactggaagagcactgttaacgcgctaaacctacccaaaatcccgttggaggctcatcgttcctattcaggcagatgttatcgaggtccgacnnnnnnaaaaacctcccccaaaaccgacaaaaacgatcggatacgcatgaggct

SEQ ID NO: 1746 - DNA, 146 bp, Artificial Sequence
  Bisulfite Padlock Probe
  misc_feature 93, 94, 95, 96, 97, 98: n = A,T,C or G
gactggaagagcactgttaacgcgctaaacctacccgaaatcccgttggaggctcatcgttcctattcaggcagatgttatcgaggtccgacnnnnnnaaaaacctcccccaaaaccgacgaaaacgatcggatacgcatgaggct

SEQ ID NO: 1747 - DNA, 146 bp, Artificial Sequence
  Bisulfite Padlock Probe
  misc_feature 92, 93, 94, 95, 96, 97: n = A,T,C or G
gactggaagagcactgttaacgctaaaacctcctaaacaaaaagttggaggctcatcgttcctattcaggcagatgttatcgaggtccgacnnnnnncaacttcacgacgaccacaaccaaaaacagatcggatacgcatgaggct

SEQ ID NO: 1748 - DNA, 146 bp, Artificial Sequence
  Bisulfite Padlock Probe
  misc_feature 95, 96, 97, 98, 99, 100: n = A,T,C or G
gactggaagagcactgttaacgctaaaatttaccgaacgatacaacgttggaggctcatcgttcctattcaggcagatgttatcgaggtccgacnnnnnncaaatttcatccccaaaccccaacccgatcggatacgcatgaggct

SEQ ID NO: 1749 - DNA, 146 bp, Artificial Sequence
  Bisulfite Padlock Probe
  misc_feature 95, 96, 97, 98, 99, 100: n = A,T,C or G
gactggaagagcactgttaacgctaaaatttaccgaacgatacgacgttggaggctcatcgttcctattcaggcagatgttatcgaggtccgacnnnnnncaaatttcatccccaaaccccgacccgatcggatacgcatgaggct

SEQ ID NO: 1750 - DNA, 146 bp, Artificial Sequence
  Bisulfite Padlock Probe
  misc_feature 92, 93, 94, 95, 96, 97: n = A,T,C or G
gactggaagagcactgttaacgctacgcgaaacgctcaataaagttggaggctcatcgttcctattcaggcagatgttatcgaggtccgacnnnnnnctcaaacaaacgaatcccaatcgaaacacgatcggatacgcatgaggct

SEQ ID NO: 1751 - DNA, 146 bp, Artificial Sequence
  Bisulfite Padlock Probe
  misc_feature 92, 93, 94, 95, 96, 97: n = A,T,C or G
gactggaagagcactgttaacgctacgcgaaacgctcgataaagttggaggctcatcgttcctattcaggcagatgttatcgaggtccgacnnnnnnctcaaacaaacgaatcccaatcgaaacgcgatcggatacgcatgaggct

SEQ ID NO: 1752 - DNA, 146 bp, Artificial Sequence
  Bisulfite Padlock Probe
  misc_feature 92, 93, 94, 95, 96, 97: n = A,T,C or G
gactggaagagcactgttaacgctcaaaatacgaaacaaaaaagttggaggctcatcgttcctattcaggcagatgttatcgaggtccgacnnnnnnaaacgaaacgaaaacgcaactaccaaaacgatcggatacgcatgaggct

SEQ ID NO: 1753 - DNA, 146 bp, Artificial Sequence
  Bisulfite Padlock Probe
  misc_feature 92, 93, 94, 95, 96, 97: n = A,T,C or G
gactggaagagcactgttaacgctcaaaatacgaaacgaaaaagttggaggctcatcgttcctattcaggcagatgttatcgaggtccgacnnnnnnaaacgaaacgaaaacgcaactaccgaaacgatcggatacgcatgaggct

SEQ ID NO: 1754 - DNA, 146 bp, Artificial Sequence
  Bisulfite Padlock Probe
  misc_feature 92, 93, 94, 95, 96, 97: n = A,T,C or G
gactggaagagcactgttaacgctcccacctaaactacaatacgttggaggctcatcgttcctattcaggcagatgttatcgaggtccgacnnnnnnctaaatcccaaccaaactacaaaaacctcgatcggatacgcatgaggct

SEQ ID NO: 1755 - DNA, 146 bp, Artificial Sequence
  Bisulfite Padlock Probe
  misc_feature 92, 93, 94, 95, 96, 97: n = A,T,C or G
gactggaagagcactgttaacgctcccacctaaactacgatacgttggaggctcatcgttcctattcaggcagatgttatcgaggtccgacnnnnnnctaaatcccaaccgaactacaaaaacctcgatcggatacgcatgaggct

SEQ ID NO: 1756 - DNA, 146 bp, Artificial Sequence
  Bisulfite Padlock Probe
  misc_feature 93, 94, 95, 96, 97, 98: n = A,T,C or G
gactggaagagcactgttaacgtaaacgacacaatacccctaacgttggaggctcatcgttcctattcaggcagatgttatcgaggtccgacnnnnnnaaactctctaataaaatcaaaacccaacgatcggatacgcatgaggct

SEQ ID NO: 1757 - DNA, 146 bp, Artificial Sequence
  Bisulfite Padlock Probe
  misc_feature 93, 94, 95, 96, 97, 98: n = A,T,C or G
gactggaagagcactgttaacgtaaacgacacgatacccctaacgttggaggctcatcgttcctattcaggcagatgttatcgaggtccgacnnnnnnaaactctctaataaaatcgaaacccaacgatcggatacgcatgaggct

SEQ ID NO: 1758 - DNA, 146 bp, Artificial Sequence
  Bisulfite Padlock Probe
  misc_feature 92, 93, 94, 95, 96, 97: n = A,T,C or G
gactggaagagcactgttaacgtaacctctctcccttccctccgttggaggctcatcgttcctattcaggcagatgttatcgaggtccgacnnnnnntataaccgaatcaatatataaaatattaagatcggatacgcatgaggct

SEQ ID NO: 1759 - DNA, 146 bp, Artificial Sequence
  Bisulfite Padlock Probe
  misc_feature 96, 97, 98, 99, 100, 101: n = A,T,C or G
gactggaagagcactgttaacgtaatactctaaaacccgccaaaaacgttggaggctcatcgttcctattcaggcagatgttatcgaggtccgacnnnnnnaaacgaaatacgcgcaacttaaaaagatcggatacgcatgaggct

SEQ ID NO: 1760 - DNA, 146 bp, Artificial Sequence
  Bisulfite Padlock Probe
  misc_feature 96, 97, 98, 99, 100, 101: n = A,T,C or G
gactggaagagcactgttaacgtaatactctaaaacccgccgaaaacgttggaggctcatcgttcctattcaggcagatgttatcgaggtccgacnnnnnnaaacgaaatacgcgcgacttaaaaagatcggatacgcatgaggct

SEQ ID NO: 1761 - DNA, 146 bp, Artificial Sequence
  Bisulfite Padlock Probe
  misc_feature 95, 96, 97, 98, 99, 100: n = A,T,C or G
gactggaagagcactgttaacgtacacaaacaaaactctaattaacgttggaggctcatcgttcctattcaggcagatgttatcgaggtccgacnnnnnnaaaaatcgcccgcaaacaacaaaaacgatcggatacgcatgaggct

SEQ ID NO: 1762 - DNA, 146 bp, Artificial Sequence
  Bisulfite Padlock Probe
  misc_feature 95, 96, 97, 98, 99, 100: n = A,T,C or G
gactggaagagcactgttaacgtacacaaacgaaactctaattaacgttggaggctcatcgttcctattcaggcagatgttatcgaggtccgacnnnnnnaaaaatcgcccgcaaacaacgaaaacgatcggatacgcatgaggct

SEQ ID NO: 1763 - DNA, 146 bp, Artificial Sequence
  Bisulfite Padlock Probe
  misc_feature 92, 93, 94, 95, 96, 97: n = A,T,C or G
gactggaagagcactgttaacgtcccgaaatctaaaacaaaacgttggaggctcatcgttcctattcaggcagatgttatcgaggtccgacnnnnnnaaaaacaaaacttttctattaaaacatccgatcggatacgcatgaggct

SEQ ID NO: 1764 - DNA, 146 bp, Artificial Sequence
  Bisulfite Padlock Probe
  misc_feature 92, 93, 94, 95, 96, 97: n = A,T,C or G
gactggaagagcactgttaacgtcccgaaatctaaaacgaaacgttggaggctcatcgttcctattcaggcagatgttatcgaggtccgacnnnnnnaaaaacaaaacttttctattaaaacatccgatcggatacgcatgaggct

SEQ ID NO: 1765 - DNA, 146 bp, Artificial Sequence
  Bisulfite Padlock Probe
  misc_feature 92, 93, 94, 95, 96, 97: n = A,T,C or G
gactggaagagcactgttaacgtctttcttttcaaaacaaaaagttggaggctcatcgttcctattcaggcagatgttatcgaggtccgacnnnnnncaatctctaccgaacgcgaactaaatcaagatcggatacgcatgaggct

SEQ ID NO: 1766 - DNA, 146 bp, Artificial Sequence
  Bisulfite Padlock Probe
  misc_feature 96, 97, 98, 99, 100, 101: n = A,T,C or G
gactggaagagcactgttaactaaaaaccaatactcaaaaattctccgttggaggctcatcgttcctattcaggcagatgttatcgaggtccgacnnnnnnttatataaaataaaccactcctaaagatcggatacgcatgaggct

SEQ ID NO: 1767 - DNA, 146 bp, Artificial Sequence
  Bisulfite Padlock Probe
  misc_feature 96, 97, 98, 99, 100, 101: n = A,T,C or G
gactggaagagcactgttaactaaaaaccgatactcaaaaattctccgttggaggctcatcgttcctattcaggcagatgttatcgaggtccgacnnnnnnttatataaaataaaccactcctaaagatcggatacgcatgaggct

SEQ ID NO: 1768 - DNA, 146 bp, Artificial Sequence
  Bisulfite Padlock Probe
  misc_feature 92, 93, 94, 95, 96, 97: n = A,T,C or G
gactggaagagcactgttaactaaaaacttaacaaactaaaaagttggaggctcatcgttcctattcaggcagatgttatcgaggtccgacnnnnnntaacaatttcaaaaacaaaacattcaatcgatcggatacgcatgaggct

SEQ ID NO: 1769 - DNA, 146 bp, Artificial Sequence
  Bisulfite Padlock Probe
  misc_feature 92, 93, 94, 95, 96, 97: n = A,T,C or G
gactggaagagcactgttaactaaaaacttaacgaactaaaaagttggaggctcatcgttcctattcaggcagatgttatcgaggtccgacnnnnnntaacaatttcaaaaacaaaacgttcaatcgatcggatacgcatgaggct

SEQ ID NO: 1770 - DNA, 146 bp, Artificial Sequence
  Bisulfite Padlock Probe
  misc_feature 93, 94, 95, 96, 97, 98: n = A,T,C or G
gactggaagagcactgttaactaaaaatcgaacgacaaaaatacgttggaggctcatcgttcctattcaggcagatgttatcgaggtccgacnnnnnnctcccctccgaacaacaaccaataaaccgatcggatacgcatgaggct

SEQ ID NO: 1771 - DNA, 146 bp, Artificial Sequence
  Bisulfite Padlock Probe
  misc_feature 93, 94, 95, 96, 97, 98: n = A,T,C or G
gactggaagagcactgttaactaaaaatcgaacgacgaaaatacgttggaggctcatcgttcctattcaggcagatgttatcgaggtccgacnnnnnnctcccctccgaacgacaaccaataaaccgatcggatacgcatgaggct

SEQ ID NO: 1772 - DNA, 146 bp, Artificial Sequence
  Bisulfite Padlock Probe
  misc_feature 92, 93, 94, 95, 96, 97: n = A,T,C or G
gactggaagagcactgttaactaaaactaaacactcacaacacgttggaggctcatcgttcctattcaggcagatgttatcgaggtccgacnnnnnnaatccaaccccttaaaactacaaaaacccgatcggatacgcatgaggct

SEQ ID NO: 1773 - DNA, 146 bp, Artificial Sequence
  Bisulfite Padlock Probe
  misc_feature 92, 93, 94, 95, 96, 97: n = A,T,C or G
gactggaagagcactgttaactaaaactaaacactcgcaacacgttggaggctcatcgttcctattcaggcagatgttatcgaggtccgacnnnnnnaatccaaccccttaaaactacaaaaacccgatcggatacgcatgaggct

SEQ ID NO: 1774 - DNA, 146 bp, Artificial Sequence
  Bisulfite Padlock Probe
  misc_feature 95, 96, 97, 98, 99, 100: n = A,T,C or G
gactggaagagcactgttaactaaaactacaccctccttcccaaccgttggaggctcatcgttcctattcaggcagatgttatcgaggtccgacnnnnnnaaaatcgcgacgaaaaccaaactcacgatcggatacgcatgaggct

SEQ ID NO: 1775 - DNA, 146 bp, Artificial Sequence
  Bisulfite Padlock Probe
  misc_feature 95, 96, 97, 98, 99, 100: n = A,T,C or G
gactggaagagcactgttaactaaaactacgccctccttcccaaccgttggaggctcatcgttcctattcaggcagatgttatcgaggtccgacnnnnnnaaaatcgcgacgaaaaccgaactcacgatcggatacgcatgaggct

SEQ ID NO: 1776 - DNA, 146 bp, Artificial Sequence
  Bisulfite Padlock Probe
  misc_feature 93, 94, 95, 96, 97, 98: n = A,T,C or G
gactggaagagcactgttaactaaaactctaaaaaccgcaaaacgttggaggctcatcgttcctattcaggcagatgttatcgaggtccgacnnnnnnaacaataactataaacaaaaacaaccccgatcggatacgcatgaggct

SEQ ID NO: 1777 - DNA, 146 bp, Artificial Sequence
  Bisulfite Padlock Probe
  misc_feature 93, 94, 95, 96, 97, 98: n = A,T,C or G
gactggaagagcactgttaactaaaactctaaaaaccgcgaaacgttggaggctcatcgttcctattcaggcagatgttatcgaggtccgacnnnnnnaacaataactataaacaaaaacgaccccgatcggatacgcatgaggct

SEQ ID NO: 1778 - DNA, 146 bp, Artificial Sequence
  Bisulfite Padlock Probe
  misc_feature 92, 93, 94, 95, 96, 97: n = A,T,C or G
gactggaagagcactgttaactaaaatacaataacgcaatcttgttggaggctcatcgttcctattcaggcagatgttatcgaggtccgacnnnnnnaactccaattaaaaaccaaaccctaaaccgatcggatacgcatgaggct

SEQ ID NO: 1779 - DNA, 146 bp, Artificial Sequence
  Bisulfite Padlock Probe
  misc_feature 92, 93, 94, 95, 96, 97: n = A,T,C or G
gactggaagagcactgttaactaaaatacaataacgcgatcttgttggaggctcatcgttcctattcaggcagatgttatcgaggtccgacnnnnnnaactccaattaaaaaccgaaccctaaaccgatcggatacgcatgaggct

SEQ ID NO: 1780 - DNA, 146 bp, Artificial Sequence
  Bisulfite Padlock Probe
  misc_feature 92, 93, 94, 95, 96, 97: n = A,T,C or G
gactggaagagcactgttaactaaacgaaatataataatcaccgttggaggctcatcgttcctattcaggcagatgttatcgaggtccgacnnnnnncaactcgaaacaactacaattcccaaaaagatcggatacgcatgaggct

SEQ ID NO: 1781 - DNA, 146 bp, Artificial Sequence
  Bisulfite Padlock Probe
  misc_feature 92, 93, 94, 95, 96, 97: n = A,T,C or G
gactggaagagcactgttaactaaacgaaatataataatcgccgttggaggctcatcgttcctattcaggcagatgttatcgaggtccgacnnnnnncaactcgaaacgactacaattcccaaaaagatcggatacgcatgaggct

SEQ ID NO: 1782 - DNA, 146 bp, Artificial Sequence
  Bisulfite Padlock Probe
  misc_feature 95, 96, 97, 98, 99, 100: n = A,T,C or G
gactggaagagcactgttaactaaacgaccactcaaaaaccaaaccgttggaggctcatcgttcctattcaggcagatgttatcgaggtccgacnnnnnnaaacccgcgtaaacaaccacataaacgatcggatacgcatgaggct

SEQ ID NO: 1783 - DNA, 146 bp, Artificial Sequence
  Bisulfite Padlock Probe
  misc_feature 95, 96, 97, 98, 99, 100: n = A,T,C or G
gactggaagagcactgttaactaaacgaccgctcaaaaaccaaaccgttggaggctcatcgttcctattcaggcagatgttatcgaggtccgacnnnnnnaaacccgcgtaaacaaccgcataaacgatcggatacgcatgaggct

SEQ ID NO: 1784 - DNA, 146 bp, Artificial Sequence
  Bisulfite Padlock Probe
  misc_feature 94, 95, 96, 97, 98, 99: n = A,T,C or G
gactggaagagcactgttaactaaacgccgacaaaacatcaacccgttggaggctcatcgttcctattcaggcagatgttatcgaggtccgacnnnnnnaaaaatacgtatataaacgcatatacagatcggatacgcatgaggct

SEQ ID NO: 1785 - DNA, 146 bp, Artificial Sequence
  Bisulfite Padlock Probe
  misc_feature 94, 95, 96, 97, 98, 99: n = A,T,C or G
gactggaagagcactgttaactaaacgccgacaaaacgtcaacccgttggaggctcatcgttcctattcaggcagatgttatcgaggtccgacnnnnnnaaaaatacgtatataaacgcgtatacagatcggatacgcatgaggct

SEQ ID NO: 1786 - DNA, 146 bp, Artificial Sequence
  Bisulfite Padlock Probe
  misc_feature 92, 93, 94, 95, 96, 97: n = A,T,C or G
gactggaagagcactgttaactaaataccaaaactataaaatagttggaggctcatcgttcctattcaggcagatgttatcgaggtccgacnnnnnntcattctaacataaaataccatacacctcgatcggatacgcatgaggct

SEQ ID NO: 1787 - DNA, 146 bp, Artificial Sequence
  Bisulfite Padlock Probe
  misc_feature 96, 97, 98, 99, 100, 101: n = A,T,C or G
gactggaagagcactgttaactaaatcatatttaacaacctcaaaaagttggaggctcatcgttcctattcaggcagatgttatcgaggtccgacnnnnnnaaaaaccgaatactcgccacctaccgatcggatacgcatgaggct

SEQ ID NO: 1788 - DNA, 146 bp, Artificial Sequence
  Bisulfite Padlock Probe
  misc_feature 92, 93, 94, 95, 96, 97: n = A,T,C or G
gactggaagagcactgttaactaaccgaactcccgaaacacccgttggaggctcatcgttcctattcaggcagatgttatcgaggtccgacnnnnnnaactataacataaacaaacaaaatatatagatcggatacgcatgaggct

SEQ ID NO: 1789 - DNA, 146 bp, Artificial Sequence
  Bisulfite Padlock Probe
  misc_feature 92, 93, 94, 95, 96, 97: n = A,T,C or G
gactggaagagcactgttaactaaccgaactcccgaaacgcccgttggaggctcatcgttcctattcaggcagatgttatcgaggtccgacnnnnnnaactataacgtaaacaaacaaaatatatagatcggatacgcatgaggct

SEQ ID NO: 1790 - DNA, 146 bp, Artificial Sequence
  Bisulfite Padlock Probe
  misc_feature 92, 93, 94, 95, 96, 97: n = A,T,C or G
gactggaagagcactgttaactaaccgctaaaccgcaaaatccgttggaggctcatcgttcctattcaggcagatgttatcgaggtccgacnnnnnncctcaaacccatacaatactaaacaacccgatcggatacgcatgaggct

SEQ ID NO: 1791 - DNA, 146 bp, Artificial Sequence
  Bisulfite Padlock Probe
  misc_feature 92, 93, 94, 95, 96, 97: n = A,T,C or G
gactggaagagcactgttaactaaccgctaaaccgcgaaatccgttggaggctcatcgttcctattcaggcagatgttatcgaggtccgacnnnnnncctcaaacccatacgatactaaacaacccgatcggatacgcatgaggct

SEQ ID NO: 1792 - DNA, 146 bp, Artificial Sequence
  Bisulfite Padlock Probe
  misc_feature 93, 94, 95, 96, 97, 98: n = A,T,C or G
gactggaagagcactgttaactaactctcccgacctacgacacagttggaggctcatcgttcctattcaggcagatgttatcgaggtccgacnnnnnnaccgacatattcgacaacaacaacttccgatcggatacgcatgaggct

SEQ ID NO: 1793 - DNA, 146 bp, Artificial Sequence
  Bisulfite Padlock Probe
  misc_feature 93, 94, 95, 96, 97, 98: n = A,T,C or G
gactggaagagcactgttaactaactctcccgacctacgacgcagttggaggctcatcgttcctattcaggcagatgttatcgaggtccgacnnnnnnaccgacatattcgacaacgacaacttccgatcggatacgcatgaggct

SEQ ID NO: 1794 - DNA, 146 bp, Artificial Sequence
  Bisulfite Padlock Probe
  misc_feature 92, 93, 94, 95, 96, 97: n = A,T,C or G
gactggaagagcactgttaactaattaattcaactacactaaagttggaggctcatcgttcctattcaggcagatgttatcgaggtccgacnnnnnncatctataaattctcaaatcccaaaaaccgatcggatacgcatgaggct

SEQ ID NO: 1795 - DNA, 146 bp, Artificial Sequence
  Bisulfite Padlock Probe
  misc_feature 92, 93, 94, 95, 96, 97: n = A,T,C or G
gactggaagagcactgttaactaattaattcaactacgctaaagttggaggctcatcgttcctattcaggcagatgttatcgaggtccgacnnnnnncatctataaattctcgaatcccaaaaaccgatcggatacgcatgaggct

SEQ ID NO: 1796 - DNA, 146 bp, Artificial Sequence
  Bisulfite Padlock Probe
  misc_feature 95, 96, 97, 98, 99, 100: n = A,T,C or G
gactggaagagcactgttaactaattccaaatacaaatttacaaatgttggaggctcatcgttcctattcaggcagatgttatcgaggtccgacnnnnnnaaaaacgaaaccgacgacgaattcacgatcggatacgcatgaggct

SEQ ID NO: 1797 - DNA, 146 bp, Artificial Sequence
  Bisulfite Padlock Probe
  misc_feature 95, 96, 97, 98, 99, 100: n = A,T,C or G
gactggaagagcactgttaactaattccaaatacaaatttacaaatgttggaggctcatcgttcctattcaggcagatgttatcgaggtccgacnnnnnnaaaaacgaaaccgacgacgaattcgcgatcggatacgcatgaggct

SEQ ID NO: 1798 - DNA, 146 bp, Artificial Sequence
  Bisulfite Padlock Probe
  misc_feature 93, 94, 95, 96, 97, 98: n = A,T,C or G
gactggaagagcactgttaactacaaaatcctcaaaatatacccgttggaggctcatcgttcctattcaggcagatgttatcgaggtccgacnnnnnnaaaaactaaacataaacttcccaataccgatcggatacgcatgaggct

SEQ ID NO: 1799 - DNA, 146 bp, Artificial Sequence
  Bisulfite Padlock Probe
  misc_feature 92, 93, 94, 95, 96, 97: n = A,T,C or G
gactggaagagcactgttaactacaaatacgaacgaaaaccaagttggaggctcatcgttcctattcaggcagatgttatcgaggtccgacnnnnnnccaactaaaccaaaatactttccaccctcgatcggatacgcatgaggct

SEQ ID NO: 1800 - DNA, 146 bp, Artificial Sequence
  Bisulfite Padlock Probe
  misc_feature 92, 93, 94, 95, 96, 97: n = A,T,C or G
gactggaagagcactgttaactacaaatacgaacgaaaaccgagttggaggctcatcgttcctattcaggcagatgttatcgaggtccgacnnnnnnccaactaaaccgaaatactttccaccctcgatcggatacgcatgaggct

SEQ ID NO: 1801 - DNA, 146 bp, Artificial Sequence
  Bisulfite Padlock Probe
  misc_feature 95, 96, 97, 98, 99, 100: n = A,T,C or G
gactggaagagcactgttaactacaacacaaaactaaatataaaaagttggaggctcatcgttcctattcaggcagatgttatcgaggtccgacnnnnnntctaaaacactaaacttcaaacaatcgatcggatacgcatgaggct

SEQ ID NO: 1802 - DNA, 146 bp, Artificial Sequence
  Bisulfite Padlock Probe
  misc_feature 92, 93, 94, 95, 96, 97: n = A,T,C or G
gactggaagagcactgttaactacaactcaaaaccaaatcaccgttggaggctcatcgttcctattcaggcagatgttatcgaggtccgacnnnnnnattcccaaaacaaaattaatcacatttatgatcggatacgcatgaggct

SEQ ID NO: 1803 - DNA, 146 bp, Artificial Sequence
  Bisulfite Padlock Probe
  misc_feature 93, 94, 95, 96, 97, 98: n = A,T,C or G
gactggaagagcactgttaactacaatttacaacaccccaaaaagttggaggctcatcgttcctattcaggcagatgttatcgaggtccgacnnnnnnacgactacgaataaccaaacgcaacaaagatcggatacgcatgaggct

SEQ ID NO: 1804 - DNA, 146 bp, Artificial Sequence
  Bisulfite Padlock Probe
  misc_feature 93, 94, 95, 96, 97, 98: n = A,T,C or G
gactggaagagcactgttaactacaatttacgacaccccaaaaagttggaggctcatcgttcctattcaggcagatgttatcgaggtccgacnnnnnnacgactacgaataaccaaacgcgacaaagatcggatacgcatgaggct

SEQ ID NO: 1805 - DNA, 146 bp, Artificial Sequence
  Bisulfite Padlock Probe
  misc_feature 96, 97, 98, 99, 100, 101: n = A,T,C or G
gactggaagagcactgttaactacacctactataaacacctactctagttggaggctcatcgttcctattcaggcagatgttatcgaggtccgacnnnnnnacataaaaacaacgaaccaactatcgatcggatacgcatgaggct

SEQ ID NO: 1806 - DNA, 146 bp, Artificial Sequence
  Bisulfite Padlock Probe
  misc_feature 96, 97, 98, 99, 100, 101: n = A,T,C or G
gactggaagagcactgttaactacacctactataaacacctactctagttggaggctcatcgttcctattcaggcagatgttatcgaggtccgacnnnnnnacataaaaacaacgaaccgactatcgatcggatacgcatgaggct

SEQ ID NO: 1807 - DNA, 146 bp, Artificial Sequence
  Bisulfite Padlock Probe
  misc_feature 96, 97, 98, 99, 100, 101: n = A,T,C or G
gactggaagagcactgttaactacatcaccttcctaaacataatcctgttggaggctcatcgttcctattcaggcagatgttatcgaggtccgacnnnnnnacacctacacgtacataaccaacaagatcggatacgcatgaggct

SEQ ID NO: 1808 - DNA, 146 bp, Artificial Sequence
  Bisulfite Padlock Probe
  misc_feature 96, 97, 98, 99, 100, 101: n = A,T,C or G
gactggaagagcactgttaactacatcaccttcctaaacgtaatcctgttggaggctcatcgttcctattcaggcagatgttatcgaggtccgacnnnnnnacacctacacgtacgtaaccaacaagatcggatacgcatgaggct

SEQ ID NO: 1809 - DNA, 146 bp, Artificial Sequence
  Bisulfite Padlock Probe
  misc_feature 92, 93, 94, 95, 96, 97: n = A,T,C or G
gactggaagagcactgttaactacatccaccctaaaaacacacgttggaggctcatcgttcctattcaggcagatgttatcgaggtccgacnnnnnncccacacaccctctatctctactcccaacgatcggatacgcatgaggct

SEQ ID NO: 1810 - DNA, 146 bp, Artificial Sequence
  Bisulfite Padlock Probe
  misc_feature 92, 93, 94, 95, 96, 97: n = A,T,C or G
gactggaagagcactgttaactacatccaccctaaaaacgcacgttggaggctcatcgttcctattcaggcagatgttatcgaggtccgacnnnnnncccacacaccctctatctctactcccaacgatcggatacgcatgaggct

SEQ ID NO: 1811 - DNA, 146 bp, Artificial Sequence
  Bisulfite Padlock Probe
  misc_feature 95, 96, 97, 98, 99, 100: n = A,T,C or G
gactggaagagcactgttaactacccaacataccaaaccctttcccgttggaggctcatcgttcctattcaggcagatgttatcgaggtccgacnnnnnncaaaactcgctccgaaaaccacttccgatcggatacgcatgaggct

SEQ ID NO: 1812 - DNA, 146 bp, Artificial Sequence
  Bisulfite Padlock Probe
  misc_feature 95, 96, 97, 98, 99, 100: n = A,T,C or G
gactggaagagcactgttaactacccaacgtaccaaaccctttcccgttggaggctcatcgttcctattcaggcagatgttatcgaggtccgacnnnnnncaaaactcgctccgaaaaccgcttccgatcggatacgcatgaggct

SEQ ID NO: 1813 - DNA, 146 bp, Artificial Sequence
  Bisulfite Padlock Probe
  misc_feature 92, 93, 94, 95, 96, 97: n = A,T,C or G
gactggaagagcactgttaactaccccaaaaataactataaaagttggaggctcatcgttcctattcaggcagatgttatcgaggtccgacnnnnnnccctacaaccgcccaaatacccctaaatagatcggatacgcatgaggct

SEQ ID NO: 1814 - DNA, 146 bp, Artificial Sequence
  Bisulfite Padlock Probe
  misc_feature 92, 93, 94, 95, 96, 97: n = A,T,C or G
gactggaagagcactgttaactaccccgaaaataactataaaagttggaggctcatcgttcctattcaggcagatgttatcgaggtccgacnnnnnnccctacaaccgcccgaatacccctaaatagatcggatacgcatgaggct

SEQ ID NO: 1815 - DNA, 146 bp, Artificial Sequence
  Bisulfite Padlock Probe
  misc_feature 93, 94, 95, 96, 97, 98: n = A,T,C or G
gactggaagagcactgttaactacctcgacgccaactacatctagttggaggctcatcgttcctattcaggcagatgttatcgaggtccgacnnnnnntacacctactaccaaccaaacctacaacgatcggatacgcatgaggct

SEQ ID NO: 1816 - DNA, 146 bp, Artificial Sequence
  Bisulfite Padlock Probe
  misc_feature 93, 94, 95, 96, 97, 98: n = A,T,C or G
gactggaagagcactgttaactacctcgacgccaactacgtctagttggaggctcatcgttcctattcaggcagatgttatcgaggtccgacnnnnnntacacctactaccaaccaaacctacaacgatcggatacgcatgaggct

SEQ ID NO: 1817 - DNA, 146 bp, Artificial Sequence
  Bisulfite Padlock Probe
  misc_feature 93, 94, 95, 96, 97, 98: n = A,T,C or G
gactggaagagcactgttaactacgaaatcctcaaaatatacccgttggaggctcatcgttcctattcaggcagatgttatcgaggtccgacnnnnnnaaaaactaaacataaacttcccaataccgatcggatacgcatgaggct

SEQ ID NO: 1818 - DNA, 146 bp, Artificial Sequence
  Bisulfite Padlock Probe
  misc_feature 93, 94, 95, 96, 97, 98: n = A,T,C or G
gactggaagagcactgttaactacgactactaacaaactccttcgttggaggctcatcgttcctattcaggcagatgttatcgaggtccgacnnnnnntaaaaactcatacttaccacttaacccagatcggatacgcatgaggct

SEQ ID NO: 1819 - DNA, 146 bp, Artificial Sequence
  Bisulfite Padlock Probe
  misc_feature 93, 94, 95, 96, 97, 98: n = A,T,C or G
gactggaagagcactgttaactacgactactaacgaactccttcgttggaggctcatcgttcctattcaggcagatgttatcgaggtccgacnnnnnntaaaaactcatacttaccacttaacccagatcggatacgcatgaggct

SEQ ID NO: 1820 - DNA, 146 bp, Artificial Sequence
  Bisulfite Padlock Probe
  misc_feature 92, 93, 94, 95, 96, 97: n = A,T,C or G
gactggaagagcactgttaactacgactcaaaaccaaatcaccgttggaggctcatcgttcctattcaggcagatgttatcgaggtccgacnnnnnnattcccaaaacaaaattaatcacatttatgatcggatacgcatgaggct

SEQ ID NO: 1821 - DNA, 146 bp, Artificial Sequence
  Bisulfite Padlock Probe
  misc_feature 94, 95, 96, 97, 98, 99: n = A,T,C or G
gactggaagagcactgttaactacgctacgcgaaccaaacctaacgttggaggctcatcgttcctattcaggcagatgttatcgaggtccgacnnnnnncataacaactcccatcccccttacctcgatcggatacgcatgaggct

SEQ ID NO: 1822 - DNA, 146 bp, Artificial Sequence
  Bisulfite Padlock Probe
  misc_feature 94, 95, 96, 97, 98, 99: n = A,T,C or G
gactggaagagcactgttaactacgctacgcgaaccgaacctaacgttggaggctcatcgttcctattcaggcagatgttatcgaggtccgacnnnnnncataacaactcccgtcccccttacctcgatcggatacgcatgaggct

SEQ ID NO: 1823 - DNA, 146 bp, Artificial Sequence
  Bisulfite Padlock Probe
  misc_feature 94, 95, 96, 97, 98, 99: n = A,T,C or G
gactggaagagcactgttaactacgtcctcaaaaaactccaaaacgttggaggctcatcgttcctattcaggcagatgttatcgaggtccgacnnnnnnctcccaaaaacgataaccccaaaaacagatcggatacgcatgaggct

SEQ ID NO: 1824 - DNA, 146 bp, Artificial Sequence
  Bisulfite Padlock Probe
  misc_feature 94, 95, 96, 97, 98, 99: n = A,T,C or G
gactggaagagcactgttaactacgtcctcgaaaaactccaaaacgttggaggctcatcgttcctattcaggcagatgttatcgaggtccgacnnnnnnctcccaaaaacgataaccccgaaaacagatcggatacgcatgaggct

SEQ ID NO: 1825 - DNA, 146 bp, Artificial Sequence
  Bisulfite Padlock Probe
  misc_feature 94, 95, 96, 97, 98, 99: n = A,T,C or G
gactggaagagcactgttaactactaaaatatccaaaatccatctgttggaggctcatcgttcctattcaggcagatgttatcgaggtccgacnnnnnncaactaccccctacgccaaaattacccgatcggatacgcatgaggct

SEQ ID NO: 1826 - DNA, 146 bp, Artificial Sequence
  Bisulfite Padlock Probe
  misc_feature 94, 95, 96, 97, 98, 99: n = A,T,C or G
gactggaagagcactgttaactactaaaatatccgaaatccatctgttggaggctcatcgttcctattcaggcagatgttatcgaggtccgacnnnnnncaactaccccctacgccgaaattacccgatcggatacgcatgaggct

SEQ ID NO: 1827 - DNA, 146 bp, Artificial Sequence
  Bisulfite Padlock Probe
  misc_feature 95, 96, 97, 98, 99, 100: n = A,T,C or G
gactggaagagcactgttaactactacgaaaaactaccaaaaaatagttggaggctcatcgttcctattcaggcagatgttatcgaggtccgacnnnnnnaacaaccccgccgaaaataaaacaacgatcggatacgcatgaggct

SEQ ID NO: 1828 - DNA, 146 bp, Artificial Sequence
  Bisulfite Padlock Probe
  misc_feature 95, 96, 97, 98, 99, 100: n = A,T,C or G
gactggaagagcactgttaactactacgaaaaactaccgaaaaatagttggaggctcatcgttcctattcaggcagatgttatcgaggtccgacnnnnnnaacaaccccgccgaaaataaaacgacgatcggatacgcatgaggct

SEQ ID NO: 1829 - DNA, 146 bp, Artificial Sequence
  Bisulfite Padlock Probe
  misc_feature 93, 94, 95, 96, 97, 98: n = A,T,C or G
gactggaagagcactgttaactactcaaacttaaaacaactcccgttggaggctcatcgttcctattcaggcagatgttatcgaggtccgacnnnnnnctacccaaatccttctcctccccaccttgatcggatacgcatgaggct

SEQ ID NO: 1830 - DNA, 146 bp, Artificial Sequence
  Bisulfite Padlock Probe
  misc_feature 95, 96, 97, 98, 99, 100: n = A,T,C or G
gactggaagagcactgttaactactcgaactctcaaactacgcaccgttggaggctcatcgttcctattcaggcagatgttatcgaggtccgacnnnnnnacgccataacgaaaccgaacaaaaaagatcggatacgcatgaggct

SEQ ID NO: 1831 - DNA, 146 bp, Artificial Sequence
  Bisulfite Padlock Probe
  misc_feature 95, 96, 97, 98, 99, 100: n = A,T,C or G
gactggaagagcactgttaactactcgaactctcaaactacgcgccgttggaggctcatcgttcctattcaggcagatgttatcgaggtccgacnnnnnnacgccataacgaaaccgaacgaaaaagatcggatacgcatgaggct

SEQ ID NO: 1832 - DNA, 146 bp, Artificial Sequence
  Bisulfite Padlock Probe
  misc_feature 92, 93, 94, 95, 96, 97: n = A,T,C or G
gactggaagagcactgttaactataaactctaaaacgcacccagttggaggctcatcgttcctattcaggcagatgttatcgaggtccgacnnnnnngaaccacccaaaccacaaccaaaacaaacgatcggatacgcatgaggct

SEQ ID NO: 1833 - DNA, 146 bp, Artificial Sequence
  Bisulfite Padlock Probe
  misc_feature 92, 93, 94, 95, 96, 97: n = A,T,C or G
gactggaagagcactgttaactataaactctaaaacgcgcccagttggaggctcatcgttcctattcaggcagatgttatcgaggtccgacnnnnnngaaccacccgaaccacaaccaaaacaaacgatcggatacgcatgaggct

SEQ ID NO: 1834 - DNA, 146 bp, Artificial Sequence
  Bisulfite Padlock Probe
  misc_feature 93, 94, 95, 96, 97, 98: n = A,T,C or G
gactggaagagcactgttaactatttctataatatccataaaacgttggaggctcatcgttcctattcaggcagatgttatcgaggtccgacnnnnnnataacaacttactataccaaaacaaatcgatcggatacgcatgaggct

SEQ ID NO: 1835 - DNA, 146 bp, Artificial Sequence
  Bisulfite Padlock Probe
  misc_feature 94, 95, 96, 97, 98, 99: n = A,T,C or G
gactggaagagcactgttaactcaaactctataaaactataaaaagttggaggctcatcgttcctattcaggcagatgttatcgaggtccgacnnnnnnaaaaacaataaatcctacaaaaatctcgatcggatacgcatgaggct

SEQ ID NO: 1836 - DNA, 146 bp, Artificial Sequence
  Bisulfite Padlock Probe
  misc_feature 95, 96, 97, 98, 99, 100: n = A,T,C or G
gactggaagagcactgttaactcaatcaaaaacttaaaaataaaaagttggaggctcatcgttcctattcaggcagatgttatcgaggtccgacnnnnnncccccacaatattttcctccccaaaagatcggatacgcatgaggct

SEQ ID NO: 1837 - DNA, 146 bp, Artificial Sequence
  Bisulfite Padlock Probe
  misc_feature 92, 93, 94, 95, 96, 97: n = A,T,C or G
gactggaagagcactgttaactcactttttctaaaaacaaaaagttggaggctcatcgttcctattcaggcagatgttatcgaggtccgacnnnnnncccgaacccgacctaatattcaataaaaagatcggatacgcatgaggct

SEQ ID NO: 1838 - DNA, 146 bp, Artificial Sequence
  Bisulfite Padlock Probe
  misc_feature 94, 95, 96, 97, 98, 99: n = A,T,C or G
gactggaagagcactgttaactcatcctaattcaccctcaactacgttggaggctcatcgttcctattcaggcagatgttatcgaggtccgacnnnnnnccgaccgaacctcacctcacaaatatcgatcggatacgcatgaggct

SEQ ID NO: 1839 - DNA, 146 bp, Artificial Sequence
  Bisulfite Padlock Probe
  misc_feature 94, 95, 96, 97, 98, 99: n = A,T,C or G
gactggaagagcactgttaactcattttccactcaactacttcccgttggaggctcatcgttcctattcaggcagatgttatcgaggtccgacnnnnnnacaaacacatttctcacataccaaattgatcggatacgcatgaggct

SEQ ID NO: 1840 - DNA, 146 bp, Artificial Sequence
  Bisulfite Padlock Probe
  misc_feature 94, 95, 96, 97, 98, 99: n = A,T,C or G
gactggaagagcactgttaactcattttccactcgactacttcccgttggaggctcatcgttcctattcaggcagatgttatcgaggtccgacnnnnnnacaaacacatttctcacataccaaattgatcggatacgcatgaggct

SEQ ID NO: 1841 - DNA, 146 bp, Artificial Sequence
  Bisulfite Padlock Probe
  misc_feature 93, 94, 95, 96, 97, 98: n = A,T,C or G
gactggaagagcactgttaactccaaaacccaaaaactaaacttgttggaggctcatcgttcctattcaggcagatgttatcgaggtccgacnnnnnncaaactaaaaatacgctcgcgatcaaccgatcggatacgcatgaggct

SEQ ID NO: 1842 - DNA, 146 bp, Artificial Sequence
  Bisulfite Padlock Probe
  misc_feature 93, 94, 95, 96, 97, 98: n = A,T,C or G
gactggaagagcactgttaactccaaaacccgaaaactaaacttgttggaggctcatcgttcctattcaggcagatgttatcgaggtccgacnnnnnncaaactaaaaatacgctcgcgatcgaccgatcggatacgcatgaggct

SEQ ID NO: 1843 - DNA, 146 bp, Artificial Sequence
  Bisulfite Padlock Probe
  misc_feature 92, 93, 94, 95, 96, 97: n = A,T,C or G
gactggaagagcactgttaactccaaactcccgccaactaaacgttggaggctcatcgttcctattcaggcagatgttatcgaggtccgacnnnnnnaccccaaaaaccataacaaaaaattactcgatcggatacgcatgaggct

SEQ ID NO: 1844 - DNA, 146 bp, Artificial Sequence
  Bisulfite Padlock Probe
  misc_feature 92, 93, 94, 95, 96, 97: n = A,T,C or G
gactggaagagcactgttaactccaaactcccgccgactaaacgttggaggctcatcgttcctattcaggcagatgttatcgaggtccgacnnnnnnaccccaaaaaccataacgaaaaattactcgatcggatacgcatgaggct

SEQ ID NO: 1845 - DNA, 146 bp, Artificial Sequence
  Bisulfite Padlock Probe
  misc_feature 96, 97, 98, 99, 100, 101: n = A,T,C or G
gactggaagagcactgttaactccaacacgctacccaaaacctaaaagttggaggctcatcgttcctattcaggcagatgttatcgaggtccgacnnnnnntctttatctttcctccctaaaaaccgatcggatacgcatgaggct

SEQ ID NO: 1846 - DNA, 146 bp, Artificial Sequence
  Bisulfite Padlock Probe
  misc_feature 96, 97, 98, 99, 100, 101: n = A,T,C or G
gactggaagagcactgttaactccaacacgctacccgaaacctaaaagttggaggctcatcgttcctattcaggcagatgttatcgaggtccgacnnnnnntctttatctttcctccctaaaaaccgatcggatacgcatgaggct

SEQ ID NO: 1847 - DNA, 146 bp, Artificial Sequence
  Bisulfite Padlock Probe
  misc_feature 92, 93, 94, 95, 96, 97: n = A,T,C or G
gactggaagagcactgttaactccaactcaacccccaaaaaccgttggaggctcatcgttcctattcaggcagatgttatcgaggtccgacnnnnnncctcccgaatcgctactccaatacaaaaagatcggatacgcatgaggct

SEQ ID NO: 1848 - DNA, 146 bp, Artificial Sequence
  Bisulfite Padlock Probe
  misc_feature 93, 94, 95, 96, 97, 98: n = A,T,C or G
gactggaagagcactgttaactccacctcaacgacaaaaaactcgttggaggctcatcgttcctattcaggcagatgttatcgaggtccgacnnnnnnaataataaacgaaacacaaaaatactccgatcggatacgcatgaggct

SEQ ID NO: 1849 - DNA, 146 bp, Artificial Sequence
  Bisulfite Padlock Probe
  misc_feature 93, 94, 95, 96, 97, 98: n = A,T,C or G
gactggaagagcactgttaactccacctcaacgacgaaaaactcgttggaggctcatcgttcctattcaggcagatgttatcgaggtccgacnnnnnnaataataaacgaaacacgaaaatactccgatcggatacgcatgaggct

SEQ ID NO: 1850 - DNA, 146 bp, Artificial Sequence
  Bisulfite Padlock Probe
  misc_feature 95, 96, 97, 98, 99, 100: n = A,T,C or G
gactggaagagcactgttaactccacgaaataactctacaccaaacgttggaggctcatcgttcctattcaggcagatgttatcgaggtccgacnnnnnnacgcaaaataacaaaccctactttccgatcggatacgcatgaggct

SEQ ID NO: 1851 - DNA, 146 bp, Artificial Sequence
  Bisulfite Padlock Probe
  misc_feature 95, 96, 97, 98, 99, 100: n = A,T,C or G
gactggaagagcactgttaactccacgaaataactctacaccgaacgttggaggctcatcgttcctattcaggcagatgttatcgaggtccgacnnnnnnacgcaaaataacgaaccctactttccgatcggatacgcatgaggct

SEQ ID NO: 1852 - DNA, 146 bp, Artificial Sequence
  Bisulfite Padlock Probe
  misc_feature 92, 93, 94, 95, 96, 97: n = A,T,C or G
gactggaagagcactgttaactcccaccaactaccccctaatcgttggaggctcatcgttcctattcaggcagatgttatcgaggtccgacnnnnnncctaacattctaaaccacacccctccaccgatcggatacgcatgaggct

SEQ ID NO: 1853 - DNA, 146 bp, Artificial Sequence
  Bisulfite Padlock Probe
  misc_feature 92, 93, 94, 95, 96, 97: n = A,T,C or G
gactggaagagcactgttaactcccccttcctctcaatctcccgttggaggctcatcgttcctattcaggcagatgttatcgaggtccgacnnnnnnaaaatcctaacgacgacgacgcaaataatgatcggatacgcatgaggct

SEQ ID NO: 1854 - DNA, 146 bp, Artificial Sequence
  Bisulfite Padlock Probe
  misc_feature 92, 93, 94, 95, 96, 97: n = A,T,C or G
gactggaagagcactgttaactcccccttcctctcgatctcccgttggaggctcatcgttcctattcaggcagatgttatcgaggtccgacnnnnnnaaaatcctaacgacgacgacgcgaataatgatcggatacgcatgaggct

SEQ ID NO: 1855 - DNA, 146 bp, Artificial Sequence
  Bisulfite Padlock Probe
  misc_feature 93, 94, 95, 96, 97, 98: n = A,T,C or G
gactggaagagcactgttaactcccgactccaaaccctactaccgttggaggctcatcgttcctattcaggcagatgttatcgaggtccgacnnnnnnacataaaatcaaaaaccacaaattcaccgatcggatacgcatgaggct

SEQ ID NO: 1856 - DNA, 146 bp, Artificial Sequence
  Bisulfite Padlock Probe
  misc_feature 93, 94, 95, 96, 97, 98: n = A,T,C or G
gactggaagagcactgttaactcccgactccgaaccctactaccgttggaggctcatcgttcctattcaggcagatgttatcgaggtccgacnnnnnnacataaaatcaaaaaccacaaattcaccgatcggatacgcatgaggct

SEQ ID NO: 1857 - DNA, 146 bp, Artificial Sequence
  Bisulfite Padlock Probe
  misc_feature 92, 93, 94, 95, 96, 97: n = A,T,C or G
gactggaagagcactgttaactccgactcaacccccaaaaaccgttggaggctcatcgttcctattcaggcagatgttatcgaggtccgacnnnnnncctcccgaatcgctactccgatacaaaaagatcggatacgcatgaggct

SEQ ID NO: 1858 - DNA, 146 bp, Artificial Sequence
  Bisulfite Padlock Probe
  misc_feature 92, 93, 94, 95, 96, 97: n = A,T,C or G
gactggaagagcactgttaactcctaccgcgacgtcaaaaaccgttggaggctcatcgttcctattcaggcagatgttatcgaggtccgacnnnnnnaaataaaattctaacttcaaaatctactcgatcggatacgcatgaggct

SEQ ID NO: 1859 - DNA, 146 bp, Artificial Sequence
  Bisulfite Padlock Probe
  misc_feature 92, 93, 94, 95, 96, 97: n = A,T,C or G
gactggaagagcactgttaactcctaccgcgacgtcgaaaaccgttggaggctcatcgttcctattcaggcagatgttatcgaggtccgacnnnnnnaaataaaattctaacttcaaaatctactcgatcggatacgcatgaggct

SEQ ID NO: 1860 - DNA, 146 bp, Artificial Sequence
  Bisulfite Padlock Probe
  misc_feature 93, 94, 95, 96, 97, 98: n = A,T,C or G
gactggaagagcactgttaactcctccttatcccaaataaataagttggaggctcatcgttcctattcaggcagatgttatcgaggtccgacnnnnnnaaaaacacgcaaaaccgcaaaaacaaccgatcggatacgcatgaggct

SEQ ID NO: 1861 - DNA, 146 bp, Artificial Sequence
  Bisulfite Padlock Probe
  misc_feature 93, 94, 95, 96, 97, 98: n = A,T,C or G
gactggaagagcactgttaactcctccttatcccaaataaataagttggaggctcatcgttcctattcaggcagatgttatcgaggtccgacnnnnnnaaaaacacgcaaaaccgcaaaaacgaccgatcggatacgcatgaggct

SEQ ID NO: 1862 - DNA, 146 bp, Artificial Sequence
  Bisulfite Padlock Probe
  misc_feature 93, 94, 95, 96, 97, 98: n = A,T,C or G
gactggaagagcactgttaactccttacaccccaaatcccaaacgttggaggctcatcgttcctattcaggcagatgttatcgaggtccgacnnnnnnaaaaatcgctataaccaaaatccaaaaagatcggatacgcatgaggct

SEQ ID NO: 1863 - DNA, 146 bp, Artificial Sequence
  Bisulfite Padlock Probe
  misc_feature 93, 94, 95, 96, 97, 98: n = A,T,C or G
gactggaagagcactgttaactccttacgccccaaatcccaaacgttggaggctcatcgttcctattcaggcagatgttatcgaggtccgacnnnnnnaaaaatcgctataaccgaaatccaaaaagatcggatacgcatgaggct

SEQ ID NO: 1864 - DNA, 146 bp, Artificial Sequence
  Bisulfite Padlock Probe
  misc_feature 94, 95, 96, 97, 98, 99: n = A,T,C or G
gactggaagagcactgttaactcgaaaacaaaaacaaccaaaaacgttggaggctcatcgttcctattcaggcagatgttatcgaggtccgacnnnnnnataataaaaacgaccgtaacaaaaaccgatcggatacgcatgaggct

SEQ ID NO: 1865 - DNA, 146 bp, Artificial Sequence
  Bisulfite Padlock Probe
  misc_feature 94, 95, 96, 97, 98, 99: n = A,T,C or G
gactggaagagcactgttaactcgaaaacaaaaacgaccaaaaacgttggaggctcatcgttcctattcaggcagatgttatcgaggtccgacnnnnnnataataaaaacgaccgtaacgaaaaccgatcggatacgcatgaggct

SEQ ID NO: 1866 - DNA, 146 bp, Artificial Sequence
  Bisulfite Padlock Probe
  misc_feature 94, 95, 96, 97, 98, 99: n = A,T,C or G
gactggaagagcactgttaactcgaactctataaaactataaaaagttggaggctcatcgttcctattcaggcagatgttatcgaggtccgacnnnnnnaaaaacaataaatcctacgaaaatctcgatcggatacgcatgaggct

SEQ ID NO: 1867 - DNA, 146 bp, Artificial Sequence
  Bisulfite Padlock Probe
  misc_feature 96, 97, 98, 99, 100, 101: n = A,T,C or G
gactggaagagcactgttaactcgacccaaactccataaaactccaagttggaggctcatcgttcctattcaggcagatgttatcgaggtccgacnnnnnncacgaaacgttcccaaaaccccaacgatcggatacgcatgaggct

SEQ ID NO: 1868 - DNA, 146 bp, Artificial Sequence
  Bisulfite Padlock Probe
  misc_feature 96, 97, 98, 99, 100, 101: n = A,T,C or G
gactggaagagcactgttaactcgacccgaactccataaaactccaagttggaggctcatcgttcctattcaggcagatgttatcgaggtccgacnnnnnncacgaaacgttcccaaaaccccgacgatcggatacgcatgaggct

SEQ ID NO: 1869 - DNA, 146 bp, Artificial Sequence
  Bisulfite Padlock Probe
  misc_feature 92, 93, 94, 95, 96, 97: n = A,T,C or G
gactggaagagcactgttaactcgaccgaaaacaactcaaaacgttggaggctcatcgttcctattcaggcagatgttatcgaggtccgacnnnnnnaactctcgaaaataatacgccaaacaaaagatcggatacgcatgaggct

SEQ ID NO: 1870 - DNA, 146 bp, Artificial Sequence
  Bisulfite Padlock Probe
  misc_feature 92, 93, 94, 95, 96, 97: n = A,T,C or G
gactggaagagcactgttaactcgaccgaaaacaactcgaaacgttggaggctcatcgttcctattcaggcagatgttatcgaggtccgacnnnnnnaactctcgaaaataatacgccgaacaaaagatcggatacgcatgaggct

SEQ ID NO: 1871 - DNA, 146 bp, Artificial Sequence
  Bisulfite Padlock Probe
  misc_feature 95, 96, 97, 98, 99, 100: n = A,T,C or G
gactggaagagcactgttaactcgatcaaaaacttaaaaataaaaagttggaggctcatcgttcctattcaggcagatgttatcgaggtccgacnnnnnncccccacgatattttcctccccaaaagatcggatacgcatgaggct

SEQ ID NO: 1872 - DNA, 146 bp, Artificial Sequence
  Bisulfite Padlock Probe
  misc_feature 92, 93, 94, 95, 96, 97: n = A,T,C or G
gactggaagagcactgttaactcgctttttctaaaaacaaaaagttggaggctcatcgttcctattcaggcagatgttatcgaggtccgacnnnnnncccgaacccgacctaatattcgataaaaagatcggatacgcatgaggct

SEQ ID NO: 1873 - DNA, 146 bp, Artificial Sequence
  Bisulfite Padlock Probe
  misc_feature 94, 95, 96, 97, 98, 99: n = A,T,C or G
gactggaagagcactgttaactcgtcctaattcaccctcaactacgttggaggctcatcgttcctattcaggcagatgttatcgaggtccgacnnnnnnccgaccgaacctcacctcgcaaatatcgatcggatacgcatgaggct

SEQ ID NO: 1874 - DNA, 146 bp, Artificial Sequence
  Bisulfite Padlock Probe
  misc_feature 94, 95, 96, 97, 98, 99: n = A,T,C or G
gactggaagagcactgttaactctaacaaaaacctatacctataagttggaggctcatcgttcctattcaggcagatgttatcgaggtccgacnnnnnnccaacgaaacaccgacaaccacataatgatcggatacgcatgaggct

SEQ ID NO: 1875 - DNA, 146 bp, Artificial Sequence
  Bisulfite Padlock Probe
  misc_feature 94, 95, 96, 97, 98, 99: n = A,T,C or G
gactggaagagcactgttaactctaacaaaaacctatacctataagttggaggctcatcgttcctattcaggcagatgttatcgaggtccgacnnnnnnccaacgaaacaccgacaaccacgtaatgatcggatacgcatgaggct

SEQ ID NO: 1876 - DNA, 146 bp, Artificial Sequence
  Bisulfite Padlock Probe
  misc_feature 93, 94, 95, 96, 97, 98: n = A,T,C or G
gactggaagagcactgttaactctacaataacctcaccaaaaacgttggaggctcatcgttcctattcaggcagatgttatcgaggtccgacnnnnnncttcttactcctttactcccaactcacagatcggatacgcatgaggct

SEQ ID NO: 1877 - DNA, 146 bp, Artificial Sequence
  Bisulfite Padlock Probe
  misc_feature 93, 94, 95, 96, 97, 98: n = A,T,C or G
gactggaagagcactgttaactctacaataacctcgccaaaaacgttggaggctcatcgttcctattcaggcagatgttatcgaggtccgacnnnnnncttcttactcctttactcccaactcacagatcggatacgcatgaggct

SEQ ID NO: 1878 - DNA, 146 bp, Artificial Sequence
  Bisulfite Padlock Probe
  misc_feature 92, 93, 94, 95, 96, 97: n = A,T,C or G
gactggaagagcactgttaactctaccctaaccccacccccaagttggaggctcatcgttcctattcaggcagatgttatcgaggtccgacnnnnnncccaatccctactaaaacaaacccacctcgatcggatacgcatgaggct

SEQ ID NO: 1879 - DNA, 146 bp, Artificial Sequence
  Bisulfite Padlock Probe
  misc_feature 92, 93, 94, 95, 96, 97: n = A,T,C or G
gactggaagagcactgttaactctaccctaaccccacccccaagttggaggctcatcgttcctattcaggcagatgttatcgaggtccgacnnnnnncccaatccctactaaaacgaacccacctcgatcggatacgcatgaggct

SEQ ID NO: 1880 - DNA, 146 bp, Artificial Sequence
  Bisulfite Padlock Probe
  misc_feature 93, 94, 95, 96, 97, 98: n = A,T,C or G
gactggaagagcactgttaactctcaaacatactacgctacaacgttggaggctcatcgttcctattcaggcagatgttatcgaggtccgacnnnnnntccaaaataactaaactctctaaaaatcgatcggatacgcatgaggct

SEQ ID NO: 1881 - DNA, 146 bp, Artificial Sequence
  Bisulfite Padlock Probe
  misc_feature 93, 94, 95, 96, 97, 98: n = A,T,C or G
gactggaagagcactgttaactctcaaacatactacgctacgacgttggaggctcatcgttcctattcaggcagatgttatcgaggtccgacnnnnnntccaaaataactaaactctctaaaaatcgatcggatacgcatgaggct

SEQ ID NO: 1882 - DNA, 146 bp, Artificial Sequence
  Bisulfite Padlock Probe
  misc_feature 94, 95, 96, 97, 98, 99: n = A,T,C or G
gactggaagagcactgttaactctccctcccctcccaaaaataacgttggaggctcatcgttcctattcaggcagatgttatcgaggtccgacnnnnnntcacctacctaaattaacaattcctacgatcggatacgcatgaggct

SEQ ID NO: 1883 - DNA, 146 bp, Artificial Sequence
  Bisulfite Padlock Probe
  misc_feature 94, 95, 96, 97, 98, 99: n = A,T,C or G
gactggaagagcactgttaactctccctcccctcccgaaaataacgttggaggctcatcgttcctattcaggcagatgttatcgaggtccgacnnnnnntcacctacctaaattaacaattcctacgatcggatacgcatgaggct

SEQ ID NO: 1884 - DNA, 146 bp, Artificial Sequence
  Bisulfite Padlock Probe
  misc_feature 96, 97, 98, 99, 100, 101: n = A,T,C or G
gactggaagagcactgttaactctcgaaaacgaaaaactccaacaacgttggaggctcatcgttcctattcaggcagatgttatcgaggtccgacnnnnnnccgacccacccccttacaacttaaagatcggatacgcatgaggct

SEQ ID NO: 1885 - DNA, 146 bp, Artificial Sequence
  Bisulfite Padlock Probe
  misc_feature 96, 97, 98, 99, 100, 101: n = A,T,C or G
gactggaagagcactgttaactctcgaaaacgaaaaactccgacaacgttggaggctcatcgttcctattcaggcagatgttatcgaggtccgacnnnnnnccgacccgcccccttacaacttaaagatcggatacgcatgaggct

SEQ ID NO: 1886 - DNA, 146 bp, Artificial Sequence
  Bisulfite Padlock Probe
  misc_feature 94, 95, 96, 97, 98, 99: n = A,T,C or G
gactggaagagcactgttaactctcgtcctcgaaaaccaaacaacgttggaggctcatcgttcctattcaggcagatgttatcgaggtccgacnnnnnncccaaactctccgaatcctccaaatccgatcggatacgcatgaggct

SEQ ID NO: 1887 - DNA, 146 bp, Artificial Sequence
  Bisulfite Padlock Probe
  misc_feature 94, 95, 96, 97, 98, 99: n = A,T,C or G
gactggaagagcactgttaactctcgtcctcgaaaaccaaacgacgttggaggctcatcgttcctattcaggcagatgttatcgaggtccgacnnnnnncccaaactctccgaatcctccgaatccgatcggatacgcatgaggct

SEQ ID NO: 1888 - DNA, 146 bp, Artificial Sequence
  Bisulfite Padlock Probe
  misc_feature 95, 96, 97, 98, 99, 100: n = A,T,C or G
gactggaagagcactgttaactcttaaaatccaactccttataatcgttggaggctcatcgttcctattcaggcagatgttatcgaggtccgacnnnnnnaaaaactatacgcatcttcttcttacgatcggatacgcatgaggct

SEQ ID NO: 1889 - DNA, 146 bp, Artificial Sequence
  Bisulfite Padlock Probe
  misc_feature 95, 96, 97, 98, 99, 100: n = A,T,C or G
gactggaagagcactgttaactcttaaaatccaactccttataatcgttggaggctcatcgttcctattcaggcagatgttatcgaggtccgacnnnnnnaaaaactatacgcgtcttcttcttacgatcggatacgcatgaggct

SEQ ID NO: 1890 - DNA, 146 bp, Artificial Sequence
  Bisulfite Padlock Probe
  misc_feature 93, 94, 95, 96, 97, 98: n = A,T,C or G
gactggaagagcactgttaacttaaaaaccttcccgcataaaccgttggaggctcatcgttcctattcaggcagatgttatcgaggtccgacnnnnnntaacattaaaacaattaaacaaactaatgatcggatacgcatgaggct

SEQ ID NO: 1891 - DNA, 146 bp, Artificial Sequence
  Bisulfite Padlock Probe
  misc_feature 93, 94, 95, 96, 97, 98: n = A,T,C or G
gactggaagagcactgttaacttaaaaaccttcccgcgtaaaccgttggaggctcatcgttcctattcaggcagatgttatcgaggtccgacnnnnnntaacgttaaaacaattaaacaaactaatgatcggatacgcatgaggct

SEQ ID NO: 1892 - DNA, 146 bp, Artificial Sequence
  Bisulfite Padlock Probe
  misc_feature 96, 97, 98, 99, 100, 101: n = A,T,C or G
gactggaagagcactgttaacttaaaccaaataaatacgaccaacccgttggaggctcatcgttcctattcaggcagatgttatcgaggtccgacnnnnnnaaaaacgccgacgaacccaaattccgatcggatacgcatgaggct

SEQ ID NO: 1893 - DNA, 146 bp, Artificial Sequence
  Bisulfite Padlock Probe
  misc_feature 96, 97, 98, 99, 100, 101: n = A,T,C or G
gactggaagagcactgttaacttaaaccaaataaatacgaccgacccgttggaggctcatcgttcctattcaggcagatgttatcgaggtccgacnnnnnnaaaaacgccgacgaacccgaattccgatcggatacgcatgaggct

SEQ ID NO: 1894 - DNA, 146 bp, Artificial Sequence
  Bisulfite Padlock Probe
  misc_feature 96, 97, 98, 99, 100, 101: n = A,T,C or G
gactggaagagcactgttaacttaaactaataacgcgcaatctatacgttggaggctcatcgttcctattcaggcagatgttatcgaggtccgacnnnnnnctcgcgaaccgcccaaaactaaaaagatcggatacgcatgaggct

SEQ ID NO: 1895 - DNA, 146 bp, Artificial Sequence
  Bisulfite Padlock Probe
  misc_feature 96, 97, 98, 99, 100, 101: n = A,T,C or G
gactggaagagcactgttaacttaaactaataacgcgcgatctatacgttggaggctcatcgttcctattcaggcagatgttatcgaggtccgacnnnnnnctcgcgaaccgcccgaaactaaaaagatcggatacgcatgaggct

SEQ ID NO: 1896 - DNA, 146 bp, Artificial Sequence
  Bisulfite Padlock Probe
  misc_feature 94, 95, 96, 97, 98, 99: n = A,T,C or G
gactggaagagcactgttaacttaacgaacacgtacaacgcaaacgttggaggctcatcgttcctattcaggcagatgttatcgaggtccgacnnnnnntcctcctaccaaatcttctcctccaccgatcggatacgcatgaggct

SEQ ID NO: 1897 - DNA, 146 bp, Artificial Sequence
  Bisulfite Padlock Probe
  misc_feature 94, 95, 96, 97, 98, 99: n = A,T,C or G
gactggaagagcactgttaacttaacgaacacgtacaacgcgaacgttggaggctcatcgttcctattcaggcagatgttatcgaggtccgacnnnnnntcctcctaccgaatcttctcctccaccgatcggatacgcatgaggct

SEQ ID NO: 1898 - DNA, 146 bp, Artificial Sequence
  Bisulfite Padlock Probe
  misc_feature 92, 93, 94, 95, 96, 97: n = A,T,C or G
gactggaagagcactgttaacttatacctaccaacaataaaaagttggaggctcatcgttcctattcaggcagatgttatcgaggtccgacnnnnnnaactactaataactcaaaaccaaataaccgatcggatacgcatgaggct

SEQ ID NO: 1899 - DNA, 146 bp, Artificial Sequence
  Bisulfite Padlock Probe
  misc_feature 92, 93, 94, 95, 96, 97: n = A,T,C or G
gactggaagagcactgttaacttatacctaccaacaataaaaagttggaggctcatcgttcctattcaggcagatgttatcgaggtccgacnnnnnnaactactaataactcaaaaccgaataaccgatcggatacgcatgaggct

SEQ ID NO: 1900 - DNA, 146 bp, Artificial Sequence
  Bisulfite Padlock Probe
  misc_feature 94, 95, 96, 97, 98, 99: n = A,T,C or G
gactggaagagcactgttaacttcaacgtcttcgataacaacctcgttggaggctcatcgttcctattcaggcagatgttatcgaggtccgacnnnnnnataaccaaaccaaacctaacctccatcgatcggatacgcatgaggct

SEQ ID NO: 1901 - DNA, 146 bp, Artificial Sequence
  Bisulfite Padlock Probe
  misc_feature 94, 95, 96, 97, 98, 99: n = A,T,C or G
gactggaagagcactgttaacttcaacgtcttcgataacgacctcgttggaggctcatcgttcctattcaggcagatgttatcgaggtccgacnnnnnnataaccaaaccgaacctaacctccatcgatcggatacgcatgaggct

SEQ ID NO: 1902 - DNA, 146 bp, Artificial Sequence
  Bisulfite Padlock Probe
  misc_feature 92, 93, 94, 95, 96, 97: n = A,T,C or G
gactggaagagcactgttaacttcccaaccccaactttcccccgttggaggctcatcgttcctattcaggcagatgttatcgaggtccgacnnnnnncacaacctataccaaataaaaacacaaccgatcggatacgcatgaggct

SEQ ID NO: 1903 - DNA, 146 bp, Artificial Sequence
  Bisulfite Padlock Probe
  misc_feature 93, 94, 95, 96, 97, 98: n = A,T,C or G
gactggaagagcactgttaacttccccaaaactaccaaaaatacgttggaggctcatcgttcctattcaggcagatgttatcgaggtccgacnnnnnnaaaaatatacgcaaaatatacaaccaaagatcggatacgcatgaggct

SEQ ID NO: 1904 - DNA, 146 bp, Artificial Sequence
  Bisulfite Padlock Probe
  misc_feature 93, 94, 95, 96, 97, 98: n = A,T,C or G
gactggaagagcactgttaacttccccaaaactaccgaaaatacgttggaggctcatcgttcctattcaggcagatgttatcgaggtccgacnnnnnnaaaaatatacgcaaaatatacgaccaaagatcggatacgcatgaggct

SEQ ID NO: 1905 - DNA, 146 bp, Artificial Sequence
  Bisulfite Padlock Probe
  misc_feature 92, 93, 94, 95, 96, 97: n = A,T,C or G
gactggaagagcactgttaacttcccgacacccaaatcctttcgttggaggctcatcgttcctattcaggcagatgttatcgaggtccgacnnnnnnattccctaacccccgacaataacaaactcgatcggatacgcatgaggct

SEQ ID NO: 1906 - DNA, 146 bp, Artificial Sequence
  Bisulfite Padlock Probe
  misc_feature 92, 93, 94, 95, 96, 97: n = A,T,C or G
gactggaagagcactgttaacttcccgacgcccaaatcctttcgttggaggctcatcgttcctattcaggcagatgttatcgaggtccgacnnnnnnattccctaacccccgacgataacaaactcgatcggatacgcatgaggct

SEQ ID NO: 1907 - DNA, 146 bp, Artificial Sequence
  Bisulfite Padlock Probe
  misc_feature 92, 93, 94, 95, 96, 97: n = A,T,C or G
gactggaagagcactgttaacttccgactctaaaccccacaccgttggaggctcatcgttcctattcaggcagatgttatcgaggtccgacnnnnnnaaactaaaaccgacgaaaaacgaacacccgatcggatacgcatgaggct

SEQ ID NO: 1908 - DNA, 146 bp, Artificial Sequence
  Bisulfite Padlock Probe
  misc_feature 92, 93, 94, 95, 96, 97: n = A,T,C or G
gactggaagagcactgttaacttccgactctaaaccccgcaccgttggaggctcatcgttcctattcaggcagatgttatcgaggtccgacnnnnnnaaactaaaaccgacgaaaaacgaacgcccgatcggatacgcatgaggct

SEQ ID NO: 1909 - DNA, 146 bp, Artificial Sequence
  Bisulfite Padlock Probe
  misc_feature 92, 93, 94, 95, 96, 97: n = A,T,C or G
gactggaagagcactgttaacttcgctcaaacctaaaccactcgttggaggctcatcgttcctattcaggcagatgttatcgaggtccgacnnnnnntcaaaactcccaataaactctaaaaccccgatcggatacgcatgaggct

SEQ ID NO: 1910 - DNA, 146 bp, Artificial Sequence
  Bisulfite Padlock Probe
  misc_feature 92, 93, 94, 95, 96, 97: n = A,T,C or G
gactggaagagcactgttaacttcgctcgaacctaaaccactcgttggaggctcatcgttcctattcaggcagatgttatcgaggtccgacnnnnnntcaaaactcccgataaactctaaaaccccgatcggatacgcatgaggct

SEQ ID NO: 1911 - DNA, 146 bp, Artificial Sequence
  Bisulfite Padlock Probe
  misc_feature 92, 93, 94, 95, 96, 97: n = A,T,C or G
gactggaagagcactgttaacttctaattacgaacgcaaaaaagttggaggctcatcgttcctattcaggcagatgttatcgaggtccgacnnnnnngaaccgccaaaaaactcaccataaatactgatcggatacgcatgaggct

SEQ ID NO: 1912 - DNA, 146 bp, Artificial Sequence
  Bisulfite Padlock Probe
  misc_feature 92, 93, 94, 95, 96, 97: n = A,T,C or G
gactggaagagcactgttaacttctaattacgaacgcgaaaaagttggaggctcatcgttcctattcaggcagatgttatcgaggtccgacnnnnnngaaccgccgaaaaactcaccataaatactgatcggatacgcatgaggct

SEQ ID NO: 1913 - DNA, 146 bp, Artificial Sequence
  Bisulfite Padlock Probe
  misc_feature 92, 93, 94, 95, 96, 97: n = A,T,C or G
gactggaagagcactgttaactttcgccccaaccaacaactaagttggaggctcatcgttcctattcaggcagatgttatcgaggtccgacnnnnnncgatacccaatatacctaaatttcctacagatcggatacgcatgaggct

SEQ ID NO: 1914 - DNA, 146 bp, Artificial Sequence
  Bisulfite Padlock Probe
  misc_feature 92, 93, 94, 95, 96, 97: n = A,T,C or G
gactggaagagcactgttaactttcgccccaaccgacaactaagttggaggctcatcgttcctattcaggcagatgttatcgaggtccgacnnnnnncgatacccgatatacctaaatttcctacagatcggatacgcatgaggct

SEQ ID NO: 1915 - DNA, 146 bp, Artificial Sequence
  Bisulfite Padlock Probe
  misc_feature 92, 93, 94, 95, 96, 97: n = A,T,C or G
gactggaagagcactgttaactttttatacaatatttatcaccgttggaggctcatcgttcctattcaggcagatgttatcgaggtccgacnnnnnntaacttttatacaaacattcccacattctgatcggatacgcatgaggct

SEQ ID NO: 1916 - DNA, 146 bp, Artificial Sequence
  Bisulfite Padlock Probe
  misc_feature 92, 93, 94, 95, 96, 97: n = A,T,C or G
gactggaagagcactgttaactttttatacaatatttatcaccgttggaggctcatcgttcctattcaggcagatgttatcgaggtccgacnnnnnntaacttttatacaaacgttcccacattctgatcggatacgcatgaggct

SEQ ID NO: 1917 - DNA, 146 bp, Artificial Sequence
  Bisulfite Padlock Probe
  misc_feature 96, 97, 98, 99, 100, 101: n = A,T,C or G
gactggaagagcactgttaataaaaacaaacgaaaccgcgacccaacgttggaggctcatcgttcctattcaggcagatgttatcgaggtccgacnnnnnncttactttctctttcgctccatctcgatcggatacgcatgaggct

SEQ ID NO: 1918 - DNA, 146 bp, Artificial Sequence
  Bisulfite Padlock Probe
  misc_feature 96, 97, 98, 99, 100, 101: n = A,T,C or G
gactggaagagcactgttaataaaaacaaacgaaaccgcgacccgacgttggaggctcatcgttcctattcaggcagatgttatcgaggtccgacnnnnnncttactttctctttcgctccgtctcgatcggatacgcatgaggct

SEQ ID NO: 1919 - DNA, 146 bp, Artificial Sequence
  Bisulfite Padlock Probe
  misc_feature 92, 93, 94, 95, 96, 97: n = A,T,C or G
gactggaagagcactgttaataaaaaccaaatctcccctaaaagttggaggctcatcgttcctattcaggcagatgttatcgaggtccgacnnnnnnaaaataacttacccaaaaccataaaaatcgatcggatacgcatgaggct

SEQ ID NO: 1920 - DNA, 146 bp, Artificial Sequence
  Bisulfite Padlock Probe
  misc_feature 92, 93, 94, 95, 96, 97: n = A,T,C or G
gactggaagagcactgttaataaaaaccgaatctcccctaaaagttggaggctcatcgttcctattcaggcagatgttatcgaggtccgacnnnnnnaaaataacttacccaaaaccataaaaatcgatcggatacgcatgaggct

SEQ ID NO: 1921 - DNA, 146 bp, Artificial Sequence
  Bisulfite Padlock Probe
  misc_feature 92, 93, 94, 95, 96, 97: n = A,T,C or G
gactggaagagcactgttaataaaaacgacgacccaaaaccaagttggaggctcatcgttcctattcaggcagatgttatcgaggtccgacnnnnnnctctaaaaacaaaacctcaaaatctaaaagatcggatacgcatgaggct

SEQ ID NO: 1922 - DNA, 146 bp, Artificial Sequence
  Bisulfite Padlock Probe
  misc_feature 92, 93, 94, 95, 96, 97: n = A,T,C or G
gactggaagagcactgttaataaaaacgacgacccaaaaccgagttggaggctcatcgttcctattcaggcagatgttatcgaggtccgacnnnnnnctctaaaaacaaaacctcgaaatctaaaagatcggatacgcatgaggct

SEQ ID NO: 1923 - DNA, 146 bp, Artificial Sequence
  Bisulfite Padlock Probe
  misc_feature 94, 95, 96, 97, 98, 99: n = A,T,C or G
gactggaagagcactgttaataaaaataaacaataaaaactacttgttggaggctcatcgttcctattcaggcagatgttatcgaggtccgacnnnnnnaaataataaccgccgaccaaactaaacgatcggatacgcatgaggct

SEQ ID NO: 1924 - DNA, 146 bp, Artificial Sequence
  Bisulfite Padlock Probe
  misc_feature 94, 95, 96, 97, 98, 99: n = A,T,C or G
gactggaagagcactgttaataaaaataaacgataaaaactacttgttggaggctcatcgttcctattcaggcagatgttatcgaggtccgacnnnnnnaaataataaccgccgaccgaactaaacgatcggatacgcatgaggct

SEQ ID NO: 1925 - DNA, 146 bp, Artificial Sequence
  Bisulfite Padlock Probe
  misc_feature 92, 93, 94, 95, 96, 97: n = A,T,C or G
gactggaagagcactgttaataaaaattacccttctccatcccgttggaggctcatcgttcctattcaggcagatgttatcgaggtccgacnnnnnnaactaaaacgaaccaactaaaaattaaatgatcggatacgcatgaggct

SEQ ID NO: 1926 - DNA, 146 bp, Artificial Sequence
  Bisulfite Padlock Probe
  misc_feature 92, 93, 94, 95, 96, 97: n = A,T,C or G
gactggaagagcactgttaataaaaattacccttctccatcccgttggaggctcatcgttcctattcaggcagatgttatcgaggtccgacnnnnnnaactaaaacgaaccgactaaaaattaaatgatcggatacgcatgaggct

SEQ ID NO: 1927 - DNA, 146 bp, Artificial Sequence
  Bisulfite Padlock Probe
  misc_feature 92, 93, 94, 95, 96, 97: n = A,T,C or G
gactggaagagcactgttaataaaacaccaaaacacctaataagttggaggctcatcgttcctattcaggcagatgttatcgaggtccgacnnnnnncctaaactcacttatataaccccctaaaagatcggatacgcatgaggct

SEQ ID NO: 1928 - DNA, 146 bp, Artificial Sequence
  Bisulfite Padlock Probe
  misc_feature 92, 93, 94, 95, 96, 97: n = A,T,C or G
gactggaagagcactgttaataaaacaccaaaacgcctaataagttggaggctcatcgttcctattcaggcagatgttatcgaggtccgacnnnnnncctaaactcgcttatataaccccctaaaagatcggatacgcatgaggct

SEQ ID NO: 1929 - DNA, 146 bp, Artificial Sequence
  Bisulfite Padlock Probe
  misc_feature 93, 94, 95, 96, 97, 98: n = A,T,C or G
gactggaagagcactgttaataaaaccccaaatttaattatcctgttggaggctcatcgttcctattcaggcagatgttatcgaggtccgacnnnnnnaactcctccatttaatcaaatttaaaaagatcggatacgcatgaggct

SEQ ID NO: 1930 - DNA, 146 bp, Artificial Sequence
  Bisulfite Padlock Probe
  misc_feature 93, 94, 95, 96, 97, 98: n = A,T,C or G
gactggaagagcactgttaataaaaccccgaatttaattatcctgttggaggctcatcgttcctattcaggcagatgttatcgaggtccgacnnnnnnaactcctccatttaatcgaatttaaaaagatcggatacgcatgaggct

SEQ ID NO: 1931 - DNA, 146 bp, Artificial Sequence
  Bisulfite Padlock Probe
  misc_feature 94, 95, 96, 97, 98, 99: n = A,T,C or G
gactggaagagcactgttaataaaacctcttaattccccattaacgttggaggctcatcgttcctattcaggcagatgttatcgaggtccgacnnnnnnaaaaattaaaacctctacgtacactccgatcggatacgcatgaggct

SEQ ID NO: 1932 - DNA, 146 bp, Artificial Sequence
  Bisulfite Padlock Probe
  misc_feature 94, 95, 96, 97, 98, 99: n = A,T,C or G
gactggaagagcactgttaataaaacctcttaattccccattaacgttggaggctcatcgttcctattcaggcagatgttatcgaggtccgacnnnnnnaaaaattaaaacctctacgtacgctccgatcggatacgcatgaggct

SEQ ID NO: 1933 - DNA, 146 bp, Artificial Sequence
  Bisulfite Padlock Probe
  misc_feature 96, 97, 98, 99, 100, 101: n = A,T,C or G
gactggaagagcactgttaataaaactaaccaattctttacaaaaaagttggaggctcatcgttcctattcaggcagatgttatcgaggtccgacnnnnnnctctccgctcaaacaactcctcctcgatcggatacgcatgaggct

SEQ ID NO: 1934 - DNA, 146 bp, Artificial Sequence
  Bisulfite Padlock Probe
  misc_feature 96, 97, 98, 99, 100, 101: n = A,T,C or G
gactggaagagcactgttaataaaactaaccaattctttacgaaaaagttggaggctcatcgttcctattcaggcagatgttatcgaggtccgacnnnnnnctctccgctcgaacaactcctcctcgatcggatacgcatgaggct

SEQ ID NO: 1935 - DNA, 146 bp, Artificial Sequence
  Bisulfite Padlock Probe
  misc_feature 94, 95, 96, 97, 98, 99: n = A,T,C or G
gactggaagagcactgttaataaaactaatatatactaccctttagttggaggctcatcgttcctattcaggcagatgttatcgaggtccgacnnnnnnaaacaaatcaaactccccatattaaacgatcggatacgcatgaggct

SEQ ID NO: 1936 - DNA, 146 bp, Artificial Sequence
  Bisulfite Padlock Probe
  misc_feature 94, 95, 96, 97, 98, 99: n = A,T,C or G
gactggaagagcactgttaataaaactaatatatactaccctttagttggaggctcatcgttcctattcaggcagatgttatcgaggtccgacnnnnnnaaacaaatcaaactccccgtattaaacgatcggatacgcatgaggct

SEQ ID NO: 1937 - DNA, 146 bp, Artificial Sequence
  Bisulfite Padlock Probe
  misc_feature 96, 97, 98, 99, 100, 101: n = A,T,C or G
gactggaagagcactgttaataaaataaaaccccaaaccccaactccgttggaggctcatcgttcctattcaggcagatgttatcgaggtccgacnnnnnnaccctcttaaccctcaaactcctccgatcggatacgcatgaggct

SEQ ID NO: 1938 - DNA, 146 bp, Artificial Sequence
  Bisulfite Padlock Probe
  misc_feature 96, 97, 98, 99, 100, 101: n = A,T,C or G
gactggaagagcactgttaataaaataaaaccccgaaccccaactccgttggaggctcatcgttcctattcaggcagatgttatcgaggtccgacnnnnnnaccctcttaaccctcaaactcctccgatcggatacgcatgaggct

SEQ ID NO: 1939 - DNA, 146 bp, Artificial Sequence
  Bisulfite Padlock Probe
  misc_feature 95, 96, 97, 98, 99, 100: n = A,T,C or G
gactggaagagcactgttaataaaccgaactcaaacttttaaaaccgttggaggctcatcgttcctattcaggcagatgttatcgaggtccgacnnnnnncccgcaaacaccaactattctcaaccgatcggatacgcatgaggct

SEQ ID NO: 1940 - DNA, 146 bp, Artificial Sequence
  Bisulfite Padlock Probe
  misc_feature 95, 96, 97, 98, 99, 100: n = A,T,C or G
gactggaagagcactgttaataaaccgaactcgaacttttaaaaccgttggaggctcatcgttcctattcaggcagatgttatcgaggtccgacnnnnnncccgcaaacaccgactattctcaaccgatcggatacgcatgaggct

SEQ ID NO: 1941 - DNA, 146 bp, Artificial Sequence
  Bisulfite Padlock Probe
  misc_feature 92, 93, 94, 95, 96, 97: n = A,T,C or G
gactggaagagcactgttaataaacctatcacctccaaaaaacgttggaggctcatcgttcctattcaggcagatgttatcgaggtccgacnnnnnnccctaaccaaacaaacaccataaaaacccgatcggatacgcatgaggct

SEQ ID NO: 1942 - DNA, 146 bp, Artificial Sequence
  Bisulfite Padlock Probe
  misc_feature 92, 93, 94, 95, 96, 97: n = A,T,C or G
gactggaagagcactgttaataaacctatcacctccgaaaaacgttggaggctcatcgttcctattcaggcagatgttatcgaggtccgacnnnnnnccctaaccaaacaaacaccataaaaacccgatcggatacgcatgaggct

SEQ ID NO: 1943 - DNA, 146 bp, Artificial Sequence
  Bisulfite Padlock Probe
  misc_feature 94, 95, 96, 97, 98, 99: n = A,T,C or G
gactggaagagcactgttaataaacgcgaacgcaaccgcataaaagttggaggctcatcgttcctattcaggcagatgttatcgaggtccgacnnnnnnaaacctaaaacgaacaaataaatacaagatcggatacgcatgaggct

SEQ ID NO: 1944 - DNA, 146 bp, Artificial Sequence
  Bisulfite Padlock Probe
  misc_feature 94, 95, 96, 97, 98, 99: n = A,T,C or G
gactggaagagcactgttaataaacgcgaacgcaaccgcgtaaaagttggaggctcatcgttcctattcaggcagatgttatcgaggtccgacnnnnnnaaacctaaaacgaacgaataaatacaagatcggatacgcatgaggct

SEQ ID NO: 1945 - DNA, 146 bp, Artificial Sequence
  Bisulfite Padlock Probe
  misc_feature 95, 96, 97, 98, 99, 100: n = A,T,C or G
gactggaagagcactgttaataaataattacaattaataaaacaaagttggaggctcatcgttcctattcaggcagatgttatcgaggtccgacnnnnnnccttcacccaacatctcaaaaactacgatcggatacgcatgaggct

SEQ ID NO: 1946 - DNA, 146 bp, Artificial Sequence
  Bisulfite Padlock Probe
  misc_feature 95, 96, 97, 98, 99, 100: n = A,T,C or G
gactggaagagcactgttaataaatacaactccctcaactcactccgttggaggctcatcgttcctattcaggcagatgttatcgaggtccgacnnnnnnaccctaaatcaaaataaacaaaaacagatcggatacgcatgaggct

SEQ ID NO: 1947 - DNA, 146 bp, Artificial Sequence
  Bisulfite Padlock Probe
  misc_feature 95, 96, 97, 98, 99, 100: n = A,T,C or G
gactggaagagcactgttaataaatacaactccctcaactcactccgttggaggctcatcgttcctattcaggcagatgttatcgaggtccgacnnnnnnaccctaaatcaaaataaacgaaaacagatcggatacgcatgaggct

SEQ ID NO: 1948 - DNA, 146 bp, Artificial Sequence
  Bisulfite Padlock Probe
  misc_feature 92, 93, 94, 95, 96, 97: n = A,T,C or G
gactggaagagcactgttaataaatatatctctacaaaataacgttggaggctcatcgttcctattcaggcagatgttatcgaggtccgacnnnnnnacttaccaaaaccacctaccctctaaaaagatcggatacgcatgaggct

SEQ ID NO: 1949 - DNA, 146 bp, Artificial Sequence
  Bisulfite Padlock Probe
  misc_feature 92, 93, 94, 95, 96, 97: n = A,T,C or G
gactggaagagcactgttaataaatatatctctacgaaataacgttggaggctcatcgttcctattcaggcagatgttatcgaggtccgacnnnnnnacttaccgaaaccacctaccctctaaaaagatcggatacgcatgaggct

SEQ ID NO: 1950 - DNA, 146 bp, Artificial Sequence
  Bisulfite Padlock Probe
  misc_feature 92, 93, 94, 95, 96, 97: n = A,T,C or G
gactggaagagcactgttaataaatcataaataactctaaaaagttggaggctcatcgttcctattcaggcagatgttatcgaggtccgacnnnnnnctaaaacctccaacctttactacctacctgatcggatacgcatgaggct

SEQ ID NO: 1951 - DNA, 146 bp, Artificial Sequence
  Bisulfite Padlock Probe
  misc_feature 94, 95, 96, 97, 98, 99: n = A,T,C or G
gactggaagagcactgttaataaatccgaactaccgaccccacacgttggaggctcatcgttcctattcaggcagatgttatcgaggtccgacnnnnnnaaaccctacaaatttccctcactaaccgatcggatacgcatgaggct

SEQ ID NO: 1952 - DNA, 146 bp, Artificial Sequence
  Bisulfite Padlock Probe
  misc_feature 94, 95, 96, 97, 98, 99: n = A,T,C or G
gactggaagagcactgttaataaatccgaactaccgaccccgcacgttggaggctcatcgttcctattcaggcagatgttatcgaggtccgacnnnnnnaaaccctacaaatttccctcactaaccgatcggatacgcatgaggct

SEQ ID NO: 1953 - DNA, 146 bp, Artificial Sequence
  Bisulfite Padlock Probe
  misc_feature 92, 93, 94, 95, 96, 97: n = A,T,C or G
gactggaagagcactgttaataaatccgcaaaatatcaaaaccgttggaggctcatcgttcctattcaggcagatgttatcgaggtccgacnnnnnnaaaaacgcaaaacaaaaccacgtcaaaaagatcggatacgcatgaggct

SEQ ID NO: 1954 - DNA, 146 bp, Artificial Sequence
  Bisulfite Padlock Probe
  misc_feature 92, 93, 94, 95, 96, 97: n = A,T,C or G
gactggaagagcactgttaataaatccgcaaaatatcgaaaccgttggaggctcatcgttcctattcaggcagatgttatcgaggtccgacnnnnnnaaaaacgcaaaacaaaaccacgtcgaaaagatcggatacgcatgaggct

SEQ ID NO: 1955 - DNA, 146 bp, Artificial Sequence
  Bisulfite Padlock Probe
  misc_feature 92, 93, 94, 95, 96, 97: n = A,T,C or G
gactggaagagcactgttaataaatcgtaaataactctaaaaagttggaggctcatcgttcctattcaggcagatgttatcgaggtccgacnnnnnnctaaaacctccaacctttactacctacctgatcggatacgcatgaggct

SEQ ID NO: 1956 - DNA, 146 bp, Artificial Sequence
  Bisulfite Padlock Probe
  misc_feature 94, 95, 96, 97, 98, 99: n = A,T,C or G
gactggaagagcactgttaataaatctcctacaaaacctaaacccgttggaggctcatcgttcctattcaggcagatgttatcgaggtccgacnnnnnnctacaaaccaattactcctaaaccctcgatcggatacgcatgaggct

SEQ ID NO: 1957 - DNA, 146 bp, Artificial Sequence
  Bisulfite Padlock Probe
  misc_feature 94, 95, 96, 97, 98, 99: n = A,T,C or G
gactggaagagcactgttaataaatctcctacgaaacctaaacccgttggaggctcatcgttcctattcaggcagatgttatcgaggtccgacnnnnnnctacaaaccaattactcctaaaccctcgatcggatacgcatgaggct

SEQ ID NO: 1958 - DNA, 146 bp, Artificial Sequence
  Bisulfite Padlock Probe
  misc_feature 92, 93, 94, 95, 96, 97: n = A,T,C or G
gactggaagagcactgttaataaatttctactttccacctacagttggaggctcatcgttcctattcaggcagatgttatcgaggtccgacnnnnnnaaaaatcaaccaccctaaccacatataaagatcggatacgcatgaggct

SEQ ID NO: 1959 - DNA, 146 bp, Artificial Sequence
  Bisulfite Padlock Probe
  misc_feature 92, 93, 94, 95, 96, 97: n = A,T,C or G
gactggaagagcactgttaataaatttctactttccacctacagttggaggctcatcgttcctattcaggcagatgttatcgaggtccgacnnnnnnaaaaatcaaccaccctaaccacgtataaagatcggatacgcatgaggct

SEQ ID NO: 1960 - DNA, 146 bp, Artificial Sequence
  Bisulfite Padlock Probe
  misc_feature 92, 93, 94, 95, 96, 97: n = A,T,C or G
gactggaagagcactgttaataacactaaaaccacaaatttccgttggaggctcatcgttcctattcaggcagatgttatcgaggtccgacnnnnnnaaaaacgccacctatatccttaactataagatcggatacgcatgaggct

SEQ ID NO: 1961 - DNA, 146 bp, Artificial Sequence
  Bisulfite Padlock Probe
  misc_feature 92, 93, 94, 95, 96, 97: n = A,T,C or G
gactggaagagcactgttaataacataaatacacaaaaacaccgttggaggctcatcgttcctattcaggcagatgttatcgaggtccgacnnnnnnaaaaactctaaataaccataacaatcaacgatcggatacgcatgaggct

SEQ ID NO: 1962 - DNA, 146 bp, Artificial Sequence
  Bisulfite Padlock Probe
  misc_feature 92, 93, 94, 95, 96, 97: n = A,T,C or G
gactggaagagcactgttaataacataaatacacaaaaacaccgttggaggctcatcgttcctattcaggcagatgttatcgaggtccgacnnnnnnaaaaactctaaataaccataacgatcaacgatcggatacgcatgaggct

SEQ ID NO: 1963 - DNA, 146 bp, Artificial Sequence
  Bisulfite Padlock Probe
  misc_feature 92, 93, 94, 95, 96, 97: n = A,T,C or G
gactggaagagcactgttaataacattacttcctaaaacaaaagttggaggctcatcgttcctattcaggcagatgttatcgaggtccgacnnnnnnaaaccttctataattccctccactaactagatcggatacgcatgaggct

SEQ ID NO: 1964 - DNA, 146 bp, Artificial Sequence
  Bisulfite Padlock Probe
  misc_feature 95, 96, 97, 98, 99, 100: n = A,T,C or G
gactggaagagcactgttaataacctaaactttacaaaattaaaaagttggaggctcatcgttcctattcaggcagatgttatcgaggtccgacnnnnnnaaaaatatcgaaaacaaactcttcccgatcggatacgcatgaggct

SEQ ID NO: 1965 - DNA, 146 bp, Artificial Sequence
  Bisulfite Padlock Probe
  misc_feature 95, 96, 97, 98, 99, 100: n = A,T,C or G
gactggaagagcactgttaataacctaaactttacaaaattaaaaagttggaggctcatcgttcctattcaggcagatgttatcgaggtccgacnnnnnnaaaaatatcgaaaacgaactcttcccgatcggatacgcatgaggct

SEQ ID NO: 1966 - DNA, 146 bp, Artificial Sequence
  Bisulfite Padlock Probe
  misc_feature 92, 93, 94, 95, 96, 97: n = A,T,C or G
gactggaagagcactgttaataacctaaatactacactataacgttggaggctcatcgttcctattcaggcagatgttatcgaggtccgacnnnnnnaaaaatacacacaatatatttcttattaagatcggatacgcatgaggct

SEQ ID NO: 1967 - DNA, 146 bp, Artificial Sequence
  Bisulfite Padlock Probe
  misc_feature 92, 93, 94, 95, 96, 97: n = A,T,C or G
gactggaagagcactgttaataacctaaatactacgctataacgttggaggctcatcgttcctattcaggcagatgttatcgaggtccgacnnnnnnaaaaatacacacaatatatttcttattaagatcggatacgcatgaggct

SEQ ID NO: 1968 - DNA, 146 bp, Artificial Sequence
  Bisulfite Padlock Probe
  misc_feature 92, 93, 94, 95, 96, 97: n = A,T,C or G
gactggaagagcactgttaataacctaccaaccacaaaacaaagttggaggctcatcgttcctattcaggcagatgttatcgaggtccgacnnnnnnctttctctaccaccatttcttctcctctcgatcggatacgcatgaggct

SEQ ID NO: 1969 - DNA, 146 bp, Artificial Sequence
  Bisulfite Padlock Probe
  misc_feature 92, 93, 94, 95, 96, 97: n = A,T,C or G
gactggaagagcactgttaataacctaccaaccgcaaaacaaagttggaggctcatcgttcctattcaggcagatgttatcgaggtccgacnnnnnnctttctctaccaccatttcttctcctctcgatcggatacgcatgaggct

SEQ ID NO: 1970 - DNA, 146 bp, Artificial Sequence
  Bisulfite Padlock Probe
  misc_feature 95, 96, 97, 98, 99, 100: n = A,T,C or G
gactggaagagcactgttaataacctctcaaacaaccctcctaaaagttggaggctcatcgttcctattcaggcagatgttatcgaggtccgacnnnnnntacccgactttcatctcccacacaacgatcggatacgcatgaggct

SEQ ID NO: 1971 - DNA, 146 bp, Artificial Sequence
  Bisulfite Padlock Probe
  misc_feature 95, 96, 97, 98, 99, 100: n = A,T,C or G
gactggaagagcactgttaataacctctcgaacaaccctcctaaaagttggaggctcatcgttcctattcaggcagatgttatcgaggtccgacnnnnnntacccgactttcatctcccgcacaacgatcggatacgcatgaggct

SEQ ID NO: 1972 - DNA, 146 bp, Artificial Sequence
  Bisulfite Padlock Probe
  misc_feature 92, 93, 94, 95, 96, 97: n = A,T,C or G
gactggaagagcactgttaataacgctaaaaccacaaatttccgttggaggctcatcgttcctattcaggcagatgttatcgaggtccgacnnnnnnaaaaacgccgcctatatccttaactataagatcggatacgcatgaggct

SEQ ID NO: 1973 - DNA, 146 bp, Artificial Sequence
  Bisulfite Padlock Probe
  misc_feature 93, 94, 95, 96, 97, 98: n = A,T,C or G
gactggaagagcactgttaataactaaacaaaaacctcccaaatgttggaggctcatcgttcctattcaggcagatgttatcgaggtccgacnnnnnnccccgtcgacgacaaaaaataataaaaagatcggatacgcatgaggct

SEQ ID NO: 1974 - DNA, 146 bp, Artificial Sequence
  Bisulfite Padlock Probe
  misc_feature 93, 94, 95, 96, 97, 98: n = A,T,C or G
gactggaagagcactgttaataactaaacctacaacactaaaacgttggaggctcatcgttcctattcaggcagatgttatcgaggtccgacnnnnnnacgacctaaatataaacactacccacccgatcggatacgcatgaggct

SEQ ID NO: 1975 - DNA, 146 bp, Artificial Sequence
  Bisulfite Padlock Probe
  misc_feature 93, 94, 95, 96, 97, 98: n = A,T,C or G
gactggaagagcactgttaataactaaacctacgacactaaaacgttggaggctcatcgttcctattcaggcagatgttatcgaggtccgacnnnnnnacgacctaaatataaacactacccgcccgatcggatacgcatgaggct

SEQ ID NO: 1976 - DNA, 146 bp, Artificial Sequence
  Bisulfite Padlock Probe
  misc_feature 93, 94, 95, 96, 97, 98: n = A,T,C or G
gactggaagagcactgttaataactaaacgaaaacctcccaaatgttggaggctcatcgttcctattcaggcagatgttatcgaggtccgacnnnnnnccccgtcgacgacgaaaaataataaaaagatcggatacgcatgaggct

SEQ ID NO: 1977 - DNA, 146 bp, Artificial Sequence
  Bisulfite Padlock Probe
  misc_feature 93, 94, 95, 96, 97, 98: n = A,T,C or G
gactggaagagcactgttaataactacccgcaaacaaccaaaacgttggaggctcatcgttcctattcaggcagatgttatcgaggtccgacnnnnnnaatcgacgctaaatcaaacctaaaatacgatcggatacgcatgaggct

SEQ ID NO: 1978 - DNA, 146 bp, Artificial Sequence
  Bisulfite Padlock Probe
  misc_feature 93, 94, 95, 96, 97, 98: n = A,T,C or G
gactggaagagcactgttaataactacccgcgaacaaccaaaacgttggaggctcatcgttcctattcaggcagatgttatcgaggtccgacnnnnnnaatcgacgctaaatcgaacctaaaatacgatcggatacgcatgaggct

SEQ ID NO: 1979 - DNA, 146 bp, Artificial Sequence
  Bisulfite Padlock Probe
  misc_feature 92, 93, 94, 95, 96, 97: n = A,T,C or G
gactggaagagcactgttaataactctactccccaatccaaccgttggaggctcatcgttcctattcaggcagatgttatcgaggtccgacnnnnnnatcccctactcctcaaaaatcaacaaaaagatcggatacgcatgaggct

SEQ ID NO: 1980 - DNA, 146 bp, Artificial Sequence
  Bisulfite Padlock Probe
  misc_feature 92, 93, 94, 95, 96, 97: n = A,T,C or G
gactggaagagcactgttaataactctactccccaatccaaccgttggaggctcatcgttcctattcaggcagatgttatcgaggtccgacnnnnnnatcccctactcctcgaaaatcaacaaaaagatcggatacgcatgaggct

SEQ ID NO: 1981 - DNA, 146 bp, Artificial Sequence
  Bisulfite Padlock Probe
  misc_feature 94, 95, 96, 97, 98, 99: n = A,T,C or G
gactggaagagcactgttaataacttaaatatccaaaaaataaaagttggaggctcatcgttcctattcaggcagatgttatcgaggtccgacnnnnnnacccaaactattcaaaaacttcaactcgatcggatacgcatgaggct

SEQ ID NO: 1982 - DNA, 146 bp, Artificial Sequence
  Bisulfite Padlock Probe
  misc_feature 94, 95, 96, 97, 98, 99: n = A,T,C or G
gactggaagagcactgttaataacttaaatatccgaaaaataaaagttggaggctcatcgttcctattcaggcagatgttatcgaggtccgacnnnnnnacccaaactattcgaaaacttcaactcgatcggatacgcatgaggct

SEQ ID NO: 1983 - DNA, 146 bp, Artificial Sequence
  Bisulfite Padlock Probe
  misc_feature 95, 96, 97, 98, 99, 100: n = A,T,C or G
gactggaagagcactgttaataactttataaaactacttcttaaaagttggaggctcatcgttcctattcaggcagatgttatcgaggtccgacnnnnnnaaaaaccgaaaataaacacccaaaccgatcggatacgcatgaggct

SEQ ID NO: 1984 - DNA, 146 bp, Artificial Sequence
  Bisulfite Padlock Probe
  misc_feature 95, 96, 97, 98, 99, 100: n = A,T,C or G
gactggaagagcactgttaataactttataaaactacttcttaaaagttggaggctcatcgttcctattcaggcagatgttatcgaggtccgacnnnnnnaaaaaccgaaaataaacgcccaaaccgatcggatacgcatgaggct

SEQ ID NO: 1985 - DNA, 146 bp, Artificial Sequence
  Bisulfite Padlock Probe
  misc_feature 92, 93, 94, 95, 96, 97: n = A,T,C or G
gactggaagagcactgttaataactttcccaaaattctaaaaagttggaggctcatcgttcctattcaggcagatgttatcgaggtccgacnnnnnnctcgactccctcctaatcgcaaaataaccgatcggatacgcatgaggct

SEQ ID NO: 1986 - DNA, 146 bp, Artificial Sequence
  Bisulfite Padlock Probe
  misc_feature 92, 93, 94, 95, 96, 97: n = A,T,C or G
gactggaagagcactgttaataactttcccgaaattctaaaaagttggaggctcatcgttcctattcaggcagatgttatcgaggtccgacnnnnnnctcgactccctcctaatcgcgaaataaccgatcggatacgcatgaggct

SEQ ID NO: 1987 - DNA, 146 bp, Artificial Sequence
  Bisulfite Padlock Probe
  misc_feature 95, 96, 97, 98, 99, 100: n = A,T,C or G
gactggaagagcactgttaataataaaaacccgatcaaattaaaaagttggaggctcatcgttcctattcaggcagatgttatcgaggtccgacnnnnnnatcaaaacgtaaaacccgcgaacaccgatcggatacgcatgaggct

SEQ ID NO: 1988 - DNA, 146 bp, Artificial Sequence
  Bisulfite Padlock Probe
  misc_feature 95, 96, 97, 98, 99, 100: n = A,T,C or G
gactggaagagcactgttaataataaaaacccgatcgaattaaaaagttggaggctcatcgttcctattcaggcagatgttatcgaggtccgacnnnnnnatcaaaacgtaaaacccgcgaacgccgatcggatacgcatgaggct

SEQ ID NO: 1989 - DNA, 146 bp, Artificial Sequence
  Bisulfite Padlock Probe
  misc_feature 96, 97, 98, 99, 100, 101: n = A,T,C or G
gactggaagagcactgttaataataaacgaaaccgaacaacaacaacgttggaggctcatcgttcctattcaggcagatgttatcgaggtccgacnnnnnncaaaattccccctcacccctcaaccgatcggatacgcatgaggct

SEQ ID NO: 1990 - DNA, 146 bp, Artificial Sequence
  Bisulfite Padlock Probe
  misc_feature 96, 97, 98, 99, 100, 101: n = A,T,C or G
gactggaagagcactgttaataataaacgaaaccgaacgacaacaacgttggaggctcatcgttcctattcaggcagatgttatcgaggtccgacnnnnnncgaaattccccctcacccctcaaccgatcggatacgcatgaggct

SEQ ID NO: 1991 - DNA, 146 bp, Artificial Sequence
  Bisulfite Padlock Probe
  misc_feature 92, 93, 94, 95, 96, 97: n = A,T,C or G
gactggaagagcactgttaataatccaaaacgcaaaaaaccctgttggaggctcatcgttcctattcaggcagatgttatcgaggtccgacnnnnnnaaaaccactaaatatcaaaatccctcaaagatcggatacgcatgaggct

SEQ ID NO: 1992 - DNA, 146 bp, Artificial Sequence
  Bisulfite Padlock Probe
  misc_feature 92, 93, 94, 95, 96, 97: n = A,T,C or G
gactggaagagcactgttaataatccaaaacgcgaaaaaccctgttggaggctcatcgttcctattcaggcagatgttatcgaggtccgacnnnnnnaaaaccactaaatatcaaaatccctcaaagatcggatacgcatgaggct

SEQ ID NO: 1993 - DNA, 146 bp, Artificial Sequence
  Bisulfite Padlock Probe
  misc_feature 92, 93, 94, 95, 96, 97: n = A,T,C or G
gactggaagagcactgttaataatcccgaaaatcaaataaaacgttggaggctcatcgttcctattcaggcagatgttatcgaggtccgacnnnnnntaaatctataactacctcctcccaaaaccgatcggatacgcatgaggct

SEQ ID NO: 1994 - DNA, 146 bp, Artificial Sequence
  Bisulfite Padlock Probe
  misc_feature 92, 93, 94, 95, 96, 97: n = A,T,C or G
gactggaagagcactgttaataatcccgaaaatcgaataaaacgttggaggctcatcgttcctattcaggcagatgttatcgaggtccgacnnnnnntaaatctataactacctcctcccgaaaccgatcggatacgcatgaggct

SEQ ID NO: 1995 - DNA, 146 bp, Artificial Sequence
  Bisulfite Padlock Probe
  misc_feature 96, 97, 98, 99, 100, 101: n = A,T,C or G
gactggaagagcactgttaataatctctcccaacccaaaactaaaaagttggaggctcatcgttcctattcaggcagatgttatcgaggtccgacnnnnnnaacgaaaaccctccctctaccccaagatcggatacgcatgaggct

SEQ ID NO: 1996 - DNA, 146 bp, Artificial Sequence
  Bisulfite Padlock Probe
  misc_feature 96, 97, 98, 99, 100, 101: n = A,T,C or G
gactggaagagcactgttaataatctctcccgacccaaaactaaaaagttggaggctcatcgttcctattcaggcagatgttatcgaggtccgacnnnnnnaacgaaaaccctccctctaccccgagatcggatacgcatgaggct

SEQ ID NO: 1997 - DNA, 146 bp, Artificial Sequence
  Bisulfite Padlock Probe
  misc_feature 96, 97, 98, 99, 100, 101: n = A,T,C or G
gactggaagagcactgttaataattacaaccctcttcctttcaaaaagttggaggctcatcgttcctattcaggcagatgttatcgaggtccgacnnnnnnactaaataacgaaaaccaaaaaccagatcggatacgcatgaggct

SEQ ID NO: 1998 - DNA, 146 bp, Artificial Sequence
  Bisulfite Padlock Probe
  misc_feature 96, 97, 98, 99, 100, 101: n = A,T,C or G
gactggaagagcactgttaataattacaaccctcttcctttcaaaaagttggaggctcatcgttcctattcaggcagatgttatcgaggtccgacnnnnnnactaaataacgaaaaccaaaaaccggatcggatacgcatgaggct

SEQ ID NO: 1999 - DNA, 146 bp, Artificial Sequence
  Bisulfite Padlock Probe
  misc_feature 94, 95, 96, 97, 98, 99: n = A,T,C or G
gactggaagagcactgttaataattaccgaacgtatcaaaaatatgttggaggctcatcgttcctattcaggcagatgttatcgaggtccgacnnnnnnaaaacaaatcaaactaactttaaaaccgatcggatacgcatgaggct

SEQ ID NO: 2000 - DNA, 146 bp, Artificial Sequence
  Bisulfite Padlock Probe
  misc_feature 94, 95, 96, 97, 98, 99: n = A,T,C or G
gactggaagagcactgttaataattaccgaacgtatcgaaaatatgttggaggctcatcgttcctattcaggcagatgttatcgaggtccgacnnnnnnaaaacaaatcgaactaactttaaaaccgatcggatacgcatgaggct

SEQ ID NO: 2001 - DNA, 146 bp, Artificial Sequence
  Bisulfite Padlock Probe
  misc_feature 94, 95, 96, 97, 98, 99: n = A,T,C or G
gactggaagagcactgttaataattttctcctcctaaaaattcttgttggaggctcatcgttcctattcaggcagatgttatcgaggtccgacnnnnnnaatcctaatacacccaaaaaatctacagatcggatacgcatgaggct

SEQ ID NO: 2002 - DNA, 146 bp, Artificial Sequence
  Bisulfite Padlock Probe
  misc_feature 94, 95, 96, 97, 98, 99: n = A,T,C or G
gactggaagagcactgttaataattttctcctcctaaaaattcttgttggaggctcatcgttcctattcaggcagatgttatcgaggtccgacnnnnnnaatcctaatacacccgaaaaatctacagatcggatacgcatgaggct

SEQ ID NO: 2003 - DNA, 146 bp, Artificial Sequence
  Bisulfite Padlock Probe
  misc_feature 93, 94, 95, 96, 97, 98: n = A,T,C or G
gactggaagagcactgttaatacaaacataactcactacaacctgttggaggctcatcgttcctattcaggcagatgttatcgaggtccgacnnnnnncccactccgaaaataacaactcaaaacagatcggatacgcatgaggct

SEQ ID NO: 2004 - DNA, 146 bp, Artificial Sequence
  Bisulfite Padlock Probe
  misc_feature 93, 94, 95, 96, 97, 98: n = A,T,C or G
gactggaagagcactgttaatacaaacataactcactacaacctgttggaggctcatcgttcctattcaggcagatgttatcgaggtccgacnnnnnncccactccgaaaataacaactcgaaacagatcggatacgcatgaggct

SEQ ID NO: 2005 - DNA, 146 bp, Artificial Sequence
  Bisulfite Padlock Probe
  misc_feature 92, 93, 94, 95, 96, 97: n = A,T,C or G
gactggaagagcactgttaatacaacccaaatacctcctaaaagttggaggctcatcgttcctattcaggcagatgttatcgaggtccgacnnnnnnatactctcaaattttaataaatcacaattgatcggatacgcatgaggct

SEQ ID NO: 2006 - DNA, 146 bp, Artificial Sequence
  Bisulfite Padlock Probe
  misc_feature 96, 97, 98, 99, 100, 101: n = A,T,C or G
gactggaagagcactgttaatacataattaacatctactcacaatacgttggaggctcatcgttcctattcaggcagatgttatcgaggtccgacnnnnnnctccccaacaacctccctatcaaacgatcggatacgcatgaggct

SEQ ID NO: 2007 - DNA, 146 bp, Artificial Sequence
  Bisulfite Padlock Probe
  misc_feature 96, 97, 98, 99, 100, 101: n = A,T,C or G
gactggaagagcactgttaatacataattaacgtctactcacaatacgttggaggctcatcgttcctattcaggcagatgttatcgaggtccgacnnnnnnctccccaacaacctccctatcaaacgatcggatacgcatgaggct

SEQ ID NO: 2008 - DNA, 146 bp, Artificial Sequence
  Bisulfite Padlock Probe
  misc_feature 92, 93, 94, 95, 96, 97: n = A,T,C or G
gactggaagagcactgttaatacattcacattctaactaaaaagttggaggctcatcgttcctattcaggcagatgttatcgaggtccgacnnnnnnaaaaacgaacgaccgaaaacgcaaaactagatcggatacgcatgaggct

SEQ ID NO: 2009 - DNA, 146 bp, Artificial Sequence
  Bisulfite Padlock Probe
  misc_feature 92, 93, 94, 95, 96, 97: n = A,T,C or G
gactggaagagcactgttaatacattcacgttctaactaaaaagttggaggctcatcgttcctattcaggcagatgttatcgaggtccgacnnnnnnaaaaacgaacgaccgaaaacgcgaaactagatcggatacgcatgaggct

SEQ ID NO: 2010 - DNA, 146 bp, Artificial Sequence
  Bisulfite Padlock Probe
  misc_feature 94, 95, 96, 97, 98, 99: n = A,T,C or G
gactggaagagcactgttaataccaaacaaccccctaaaacccacgttggaggctcatcgttcctattcaggcagatgttatcgaggtccgacnnnnnnctccctaccgtactcccaaatcaaccagatcggatacgcatgaggct

SEQ ID NO: 2011 - DNA, 146 bp, Artificial Sequence
  Bisulfite Padlock Probe
  misc_feature 92, 93, 94, 95, 96, 97: n = A,T,C or G
gactggaagagcactgttaataccaaacgccaacgtacacaacgttggaggctcatcgttcctattcaggcagatgttatcgaggtccgacnnnnnntacaacgcgaaaaacaaaacacaaacaatgatcggatacgcatgaggct

SEQ ID NO: 2012 - DNA, 146 bp, Artificial Sequence
  Bisulfite Padlock Probe
  misc_feature 92, 93, 94, 95, 96, 97: n = A,T,C or G
gactggaagagcactgttaataccaaacgccaacgtacgcaacgttggaggctcatcgttcctattcaggcagatgttatcgaggtccgacnnnnnntacaacgcgaaaaacgaaacacaaacaatgatcggatacgcatgaggct

SEQ ID NO: 2013 - DNA, 146 bp, Artificial Sequence
  Bisulfite Padlock Probe
  misc_feature 92, 93, 94, 95, 96, 97: n = A,T,C or G
gactggaagagcactgttaatacccaaacgctaactcccaaaagttggaggctcatcgttcctattcaggcagatgttatcgaggtccgacnnnnnnccccaaatttactaaaataatctaaaaccgatcggatacgcatgaggct

SEQ ID NO: 2014 - DNA, 146 bp, Artificial Sequence
  Bisulfite Padlock Probe
  misc_feature 92, 93, 94, 95, 96, 97: n = A,T,C or G
gactggaagagcactgttaatacccaaacgctaactcccgaaagttggaggctcatcgttcctattcaggcagatgttatcgaggtccgacnnnnnnccccaaatttactaaaataatctaaaaccgatcggatacgcatgaggct

SEQ ID NO: 2015 - DNA, 146 bp, Artificial Sequence
  Bisulfite Padlock Probe
  misc_feature 92, 93, 94, 95, 96, 97: n = A,T,C or G
gactggaagagcactgttaatacccaaatccccgccccaatatgttggaggctcatcgttcctattcaggcagatgttatcgaggtccgacnnnnnnaccaattccactactttccttcccaacccgatcggatacgcatgaggct

SEQ ID NO: 2016 - DNA, 146 bp, Artificial Sequence
  Bisulfite Padlock Probe
  misc_feature 92, 93, 94, 95, 96, 97: n = A,T,C or G
gactggaagagcactgttaatacccaaatccccgccccgatatgttggaggctcatcgttcctattcaggcagatgttatcgaggtccgacnnnnnnaccaattccactactttccttcccaacccgatcggatacgcatgaggct

SEQ ID NO: 2017 - DNA, 146 bp, Artificial Sequence
  Bisulfite Padlock Probe
  misc_feature 92, 93, 94, 95, 96, 97: n = A,T,C or G
gactggaagagcactgttaatacccgccctcccaaaacaatccgttggaggctcatcgttcctattcaggcagatgttatcgaggtccgacnnnnnnctcctaaaataacccccaatcctcaaaacgatcggatacgcatgaggct

SEQ ID NO: 2018 - DNA, 146 bp, Artificial Sequence
  Bisulfite Padlock Probe
  misc_feature 92, 93, 94, 95, 96, 97: n = A,T,C or G
gactggaagagcactgttaatacccgccctcccaaaacgatccgttggaggctcatcgttcctattcaggcagatgttatcgaggtccgacnnnnnnctcctaaaataacccccaatcctcaaaacgatcggatacgcatgaggct

SEQ ID NO: 2019 - DNA, 146 bp, Artificial Sequence
  Bisulfite Padlock Probe
  misc_feature 92, 93, 94, 95, 96, 97: n = A,T,C or G
gactggaagagcactgttaatacccgctacctttcccaaacccgttggaggctcatcgttcctattcaggcagatgttatcgaggtccgacnnnnnnaatacattcattaaaattaccgcacactcgatcggatacgcatgaggct

SEQ ID NO: 2020 - DNA, 146 bp, Artificial Sequence
  Bisulfite Padlock Probe
  misc_feature 92, 93, 94, 95, 96, 97: n = A,T,C or G
gactggaagagcactgttaatacccgctacctttcccgaacccgttggaggctcatcgttcctattcaggcagatgttatcgaggtccgacnnnnnnaatacattcattaaaattaccgcgcactcgatcggatacgcatgaggct

SEQ ID NO: 2021 - DNA, 146 bp, Artificial Sequence
  Bisulfite Padlock Probe
  misc_feature 94, 95, 96, 97, 98, 99: n = A,T,C or G
gactggaagagcactgttaataccgaacaaccccctaaaacccacgttggaggctcatcgttcctattcaggcagatgttatcgaggtccgacnnnnnnctccctaccgtactcccgaatcaaccagatcggatacgcatgaggct

SEQ ID NO: 2022 - DNA, 146 bp, Artificial Sequence
  Bisulfite Padlock Probe
  misc_feature 93, 94, 95, 96, 97, 98: n = A,T,C or G
gactggaagagcactgttaataccgaccgaatccgacataaaaagttggaggctcatcgttcctattcaggcagatgttatcgaggtccgacnnnnnnaaacaaataaaaattaaaataaatactagatcggatacgcatgaggct

SEQ ID NO: 2023 - DNA, 146 bp, Artificial Sequence
  Bisulfite Padlock Probe
  misc_feature 93, 94, 95, 96, 97, 98: n = A,T,C or G
gactggaagagcactgttaataccgaccgaatccgacgtaaaaagttggaggctcatcgttcctattcaggcagatgttatcgaggtccgacnnnnnnaaacgaataaaaattaaaataaatactagatcggatacgcatgaggct

SEQ ID NO: 2024 - DNA, 146 bp, Artificial Sequence
  Bisulfite Padlock Probe
  misc_feature 96, 97, 98, 99, 100, 101: n = A,T,C or G
gactggaagagcactgttaatacctaaatacctacacctctaaaaccgttggaggctcatcgttcctattcaggcagatgttatcgaggtccgacnnnnnnctctacccgaaacgtatcccaaaacgatcggatacgcatgaggct

SEQ ID NO: 2025 - DNA, 146 bp, Artificial Sequence
  Bisulfite Padlock Probe
  misc_feature 96, 97, 98, 99, 100, 101: n = A,T,C or G
gactggaagagcactgttaatacctaaatacctacacctctaaaaccgttggaggctcatcgttcctattcaggcagatgttatcgaggtccgacnnnnnnctctacccgaaacgtatcccgaaacgatcggatacgcatgaggct

SEQ ID NO: 2026 - DNA, 146 bp, Artificial Sequence
  Bisulfite Padlock Probe
  misc_feature 92, 93, 94, 95, 96, 97: n = A,T,C or G
gactggaagagcactgttaatacgaaatcgtcctcccccaaccgttggaggctcatcgttcctattcaggcagatgttatcgaggtccgacnnnnnncccaacacgaatccgactcaaactaaaacgatcggatacgcatgaggct

SEQ ID NO: 2027 - DNA, 146 bp, Artificial Sequence
  Bisulfite Padlock Probe
  misc_feature 92, 93, 94, 95, 96, 97: n = A,T,C or G
gactggaagagcactgttaatacgaaatcgtcctcccccgaccgttggaggctcatcgttcctattcaggcagatgttatcgaggtccgacnnnnnncccaacacgaatccgactcgaactaaaacgatcggatacgcatgaggct

SEQ ID NO: 2028 - DNA, 146 bp, Artificial Sequence
  Bisulfite Padlock Probe
  misc_feature 93, 94, 95, 96, 97, 98: n = A,T,C or G
gactggaagagcactgttaatactccgaaaaacgtcattccaacgttggaggctcatcgttcctattcaggcagatgttatcgaggtccgacnnnnnnattacaacccgcaataaaccacaaccaagatcggatacgcatgaggct

SEQ ID NO: 2029 - DNA, 146 bp, Artificial Sequence
  Bisulfite Padlock Probe
  misc_feature 93, 94, 95, 96, 97, 98: n = A,T,C or G
gactggaagagcactgttaatactccgaaaaacgtcgttccaacgttggaggctcatcgttcctattcaggcagatgttatcgaggtccgacnnnnnnattacaacccgcaataaaccgcaaccaagatcggatacgcatgaggct

SEQ ID NO: 2030 - DNA, 146 bp, Artificial Sequence
  Bisulfite Padlock Probe
  misc_feature 96, 97, 98, 99, 100, 101: n = A,T,C or G
gactggaagagcactgttaatataaaaactactaacaaacaaattaagttggaggctcatcgttcctattcaggcagatgttatcgaggtccgacnnnnnntaaaacgacgaaataaaacgacaacgatcggatacgcatgaggct

SEQ ID NO: 2031 - DNA, 146 bp, Artificial Sequence
  Bisulfite Padlock Probe
  misc_feature 96, 97, 98, 99, 100, 101: n = A,T,C or G
gactggaagagcactgttaatataaaaactactaacaaacaaattaagttggaggctcatcgttcctattcaggcagatgttatcgaggtccgacnnnnnntaaaacgacgaaataaaacgacgacgatcggatacgcatgaggct

SEQ ID NO: 2032 - DNA, 146 bp, Artificial Sequence
  Bisulfite Padlock Probe
  misc_feature 92, 93, 94, 95, 96, 97: n = A,T,C or G
gactggaagagcactgttaatataaaacaaaaatctcaaaaacgttggaggctcatcgttcctattcaggcagatgttatcgaggtccgacnnnnnnctaacataaacaaaactaacaaataactagatcggatacgcatgaggct

SEQ ID NO: 2033 - DNA, 146 bp, Artificial Sequence
  Bisulfite Padlock Probe
  misc_feature 92, 93, 94, 95, 96, 97: n = A,T,C or G
gactggaagagcactgttaatataaaacgaaaatctcaaaaacgttggaggctcatcgttcctattcaggcagatgttatcgaggtccgacnnnnnnctaacataaacaaaactaacgaataactagatcggatacgcatgaggct

SEQ ID NO: 2034 - DNA, 146 bp, Artificial Sequence
  Bisulfite Padlock Probe
  misc_feature 92, 93, 94, 95, 96, 97: n = A,T,C or G
gactggaagagcactgttaatataaacctaacttccaaaatccgttggaggctcatcgttcctattcaggcagatgttatcgaggtccgacnnnnnnatactttatccctccaaccttctcaaaaagatcggatacgcatgaggct

SEQ ID NO: 2035 - DNA, 146 bp, Artificial Sequence
  Bisulfite Padlock Probe
  misc_feature 92, 93, 94, 95, 96, 97: n = A,T,C or G
gactggaagagcactgttaatataaacctaacttccgaaatccgttggaggctcatcgttcctattcaggcagatgttatcgaggtccgacnnnnnnatactttatccctccgaccttctcaaaaagatcggatacgcatgaggct

SEQ ID NO: 2036 - DNA, 146 bp, Artificial Sequence
  Bisulfite Padlock Probe
  misc_feature 96, 97, 98, 99, 100, 101: n = A,T,C or G
gactggaagagcactgttaatataaacgctcacatcaaaactaaaaagttggaggctcatcgttcctattcaggcagatgttatcgaggtccgacnnnnnncaaccccgaaaacgcgctcaaaaaagatcggatacgcatgaggct

SEQ ID NO: 2037 - DNA, 146 bp, Artificial Sequence
  Bisulfite Padlock Probe
  misc_feature 96, 97, 98, 99, 100, 101: n = A,T,C or G
gactggaagagcactgttaatataaacgctcacgtcaaaactaaaaagttggaggctcatcgttcctattcaggcagatgttatcgaggtccgacnnnnnncaaccccgaaaacgcgctcgaaaaagatcggatacgcatgaggct

SEQ ID NO: 2038 - DNA, 146 bp, Artificial Sequence
  Bisulfite Padlock Probe
  misc_feature 95, 96, 97, 98, 99, 100: n = A,T,C or G
gactggaagagcactgttaatataaacgtatataaacatacacaaagttggaggctcatcgttcctattcaggcagatgttatcgaggtccgacnnnnnncactacgaactacgaacatacacatagatcggatacgcatgaggct

SEQ ID NO: 2039 - DNA, 146 bp, Artificial Sequence
  Bisulfite Padlock Probe
  misc_feature 95, 96, 97, 98, 99, 100: n = A,T,C or G
gactggaagagcactgttaatataaacgtatataaacatacgcaaagttggaggctcatcgttcctattcaggcagatgttatcgaggtccgacnnnnnncactacgaactacgaacgtacacatagatcggatacgcatgaggct

SEQ ID NO: 2040 - DNA, 146 bp, Artificial Sequence
  Bisulfite Padlock Probe
  misc_feature 94, 95, 96, 97, 98, 99: n = A,T,C or G
gactggaagagcactgttaatataaatatatctaaaaacataaacgttggaggctcatcgttcctattcaggcagatgttatcgaggtccgacnnnnnncccgcatacgtaatacatatataaaaagatcggatacgcatgaggct

SEQ ID NO: 2041 - DNA, 146 bp, Artificial Sequence
  Bisulfite Padlock Probe
  misc_feature 94, 95, 96, 97, 98, 99: n = A,T,C or G
gactggaagagcactgttaatataaatatatctaaaaacgtaaacgttggaggctcatcgttcctattcaggcagatgttatcgaggtccgacnnnnnncccgcatacgtaatacgtatataaaaagatcggatacgcatgaggct

SEQ ID NO: 2042 - DNA, 146 bp, Artificial Sequence
  Bisulfite Padlock Probe
  misc_feature 94, 95, 96, 97, 98, 99: n = A,T,C or G
gactggaagagcactgttaatatacaaacgacccatacacaacaagttggaggctcatcgttcctattcaggcagatgttatcgaggtccgacnnnnnnccgaaacgaaaaccgaaacataaactcgatcggatacgcatgaggct

SEQ ID NO: 2043 - DNA, 146 bp, Artificial Sequence
  Bisulfite Padlock Probe
  misc_feature 94, 95, 96, 97, 98, 99: n = A,T,C or G
gactggaagagcactgttaatatacaaacgacccatacgcaacaagttggaggctcatcgttcctattcaggcagatgttatcgaggtccgacnnnnnnccgaaacgaaaaccgaaacgtaaactcgatcggatacgcatgaggct

SEQ ID NO: 2044 - DNA, 146 bp, Artificial Sequence
  Bisulfite Padlock Probe
  misc_feature 93, 94, 95, 96, 97, 98: n = A,T,C or G
gactggaagagcactgttaatatataatcaaccttaattaactagttggaggctcatcgttcctattcaggcagatgttatcgaggtccgacnnnnnnttacaaaaaccaaaaatccataactctagatcggatacgcatgaggct

SEQ ID NO: 2045 - DNA, 146 bp, Artificial Sequence
  Bisulfite Padlock Probe
  misc_feature 93, 94, 95, 96, 97, 98: n = A,T,C or G
gactggaagagcactgttaatatataatcaaccttaattaactagttggaggctcatcgttcctattcaggcagatgttatcgaggtccgacnnnnnnttacaaaaaccgaaaatccataactctagatcggatacgcatgaggct

SEQ ID NO: 2046 - DNA, 146 bp, Artificial Sequence
  Bisulfite Padlock Probe
  misc_feature 94, 95, 96, 97, 98, 99: n = A,T,C or G
gactggaagagcactgttaatatatcccaaacattaaactaacaagttggaggctcatcgttcctattcaggcagatgttatcgaggtccgacnnnnnnattctacgctccaaaaacccctcatccgatcggatacgcatgaggct

SEQ ID NO: 2047 - DNA, 146 bp, Artificial Sequence
  Bisulfite Padlock Probe
  misc_feature 94, 95, 96, 97, 98, 99: n = A,T,C or G
gactggaagagcactgttaatatatcccaaacgttaaactaacaagttggaggctcatcgttcctattcaggcagatgttatcgaggtccgacnnnnnnattctacgctccgaaaacccctcatccgatcggatacgcatgaggct

SEQ ID NO: 2048 - DNA, 146 bp, Artificial Sequence
  Bisulfite Padlock Probe
  misc_feature 92, 93, 94, 95, 96, 97: n = A,T,C or G
gactggaagagcactgttaatatcacctaaaacaaattataacgttggaggctcatcgttcctattcaggcagatgttatcgaggtccgacnnnnnnatacaaataaaacaaataatacattcctcgatcggatacgcatgaggct

SEQ ID NO: 2049 - DNA, 146 bp, Artificial Sequence
  Bisulfite Padlock Probe
  misc_feature 92, 93, 94, 95, 96, 97: n = A,T,C or G
gactggaagagcactgttaatatcacctaaaacgaattataacgttggaggctcatcgttcctattcaggcagatgttatcgaggtccgacnnnnnnatacaaataaaacaaataatacgttcctcgatcggatacgcatgaggct

SEQ ID NO: 2050 - DNA, 146 bp, Artificial Sequence
  Bisulfite Padlock Probe
  misc_feature 96, 97, 98, 99, 100, 101: n = A,T,C or G
gactggaagagcactgttaatatccaaacctcactctctatccccaagttggaggctcatcgttcctattcaggcagatgttatcgaggtccgacnnnnnncctattccacgaaccaccacctaccgatcggatacgcatgaggct

SEQ ID NO: 2051 - DNA, 146 bp, Artificial Sequence
  Bisulfite Padlock Probe
  misc_feature 96, 97, 98, 99, 100, 101: n = A,T,C or G
gactggaagagcactgttaatatccaaacctcactctctatccccaagttggaggctcatcgttcctattcaggcagatgttatcgaggtccgacnnnnnncctattccacgaaccgccacctaccgatcggatacgcatgaggct

SEQ ID NO: 2052 - DNA, 146 bp, Artificial Sequence
  Bisulfite Padlock Probe
  misc_feature 93, 94, 95, 96, 97, 98: n = A,T,C or G
gactggaagagcactgttaatatcccccgcaaacctcaatatccgttggaggctcatcgttcctattcaggcagatgttatcgaggtccgacnnnnnnaaaactatcacataacacacaaaaccacgatcggatacgcatgaggct

SEQ ID NO: 2053 - DNA, 146 bp, Artificial Sequence
  Bisulfite Padlock Probe
  misc_feature 93, 94, 95, 96, 97, 98: n = A,T,C or G
gactggaagagcactgttaatatcccccgcaaacctcgatatccgttggaggctcatcgttcctattcaggcagatgttatcgaggtccgacnnnnnnaaaactatcacgtaacacacaaaaccacgatcggatacgcatgaggct

SEQ ID NO: 2054 - DNA, 146 bp, Artificial Sequence
  Bisulfite Padlock Probe
  misc_feature 95, 96, 97, 98, 99, 100: n = A,T,C or G
gactggaagagcactgttaatatcctataaaaacaaaaacaaaacagttggaggctcatcgttcctattcaggcagatgttatcgaggtccgacnnnnnncataaacatatactaatctatataccgatcggatacgcatgaggct

SEQ ID NO: 2055 - DNA, 146 bp, Artificial Sequence
  Bisulfite Padlock Probe
  misc_feature 95, 96, 97, 98, 99, 100: n = A,T,C or G
gactggaagagcactgttaatatcctataaaaacgaaaacaaaacagttggaggctcatcgttcctattcaggcagatgttatcgaggtccgacnnnnnncgtaaacatatactaatctatataccgatcggatacgcatgaggct

SEQ ID NO: 2056 - DNA, 146 bp, Artificial Sequence
  Bisulfite Padlock Probe
  misc_feature 92, 93, 94, 95, 96, 97: n = A,T,C or G
gactggaagagcactgttaatatctaacaaataacctataaaagttggaggctcatcgttcctattcaggcagatgttatcgaggtccgacnnnnnnaactataatttaaaacgtccaacaaaaccgatcggatacgcatgaggct

SEQ ID NO: 2057 - DNA, 146 bp, Artificial Sequence
  Bisulfite Padlock Probe
  misc_feature 92, 93, 94, 95, 96, 97: n = A,T,C or G
gactggaagagcactgttaatatctaacgaataacctataaaagttggaggctcatcgttcctattcaggcagatgttatcgaggtccgacnnnnnnaactataatttaaaacgtccaacgaaaccgatcggatacgcatgaggct

SEQ ID NO: 2058 - DNA, 146 bp, Artificial Sequence
  Bisulfite Padlock Probe
  misc_feature 92, 93, 94, 95, 96, 97: n = A,T,C or G
gactggaagagcactgttaatatctcttcctttaccaaaataagttggaggctcatcgttcctattcaggcagatgttatcgaggtccgacnnnnnncataacctcacaaataaacatccaaaacagatcggatacgcatgaggct

SEQ ID NO: 2059 - DNA, 146 bp, Artificial Sequence
  Bisulfite Padlock Probe
  misc_feature 94, 95, 96, 97, 98, 99: n = A,T,C or G
gactggaagagcactgttaatattacaaaccgtcaactcatccaagttggaggctcatcgttcctattcaggcagatgttatcgaggtccgacnnnnnnctccctaacgtaatccgtacaactaccgatcggatacgcatgaggct

SEQ ID NO: 2060 - DNA, 146 bp, Artificial Sequence
  Bisulfite Padlock Probe
  misc_feature 94, 95, 96, 97, 98, 99: n = A,T,C or G
gactggaagagcactgttaatattacaaaccgtcaactcgtccaagttggaggctcatcgttcctattcaggcagatgttatcgaggtccgacnnnnnnctccctaacgtaatccgtacgactaccgatcggatacgcatgaggct

SEQ ID NO: 2061 - DNA, 146 bp, Artificial Sequence
  Bisulfite Padlock Probe
  misc_feature 92, 93, 94, 95, 96, 97: n = A,T,C or G
gactggaagagcactgttaatattctatccaaaactacctaacgttggaggctcatcgttcctattcaggcagatgttatcgaggtccgacnnnnnnaaaaactacgactcacactaaacacaacagatcggatacgcatgaggct

SEQ ID NO: 2062 - DNA, 146 bp, Artificial Sequence
  Bisulfite Padlock Probe
  misc_feature 92, 93, 94, 95, 96, 97: n = A,T,C or G
gactggaagagcactgttaatattctatccgaaactacctaacgttggaggctcatcgttcctattcaggcagatgttatcgaggtccgacnnnnnnaaaaactacgactcacactaaacgcaacagatcggatacgcatgaggct

SEQ ID NO: 2063 - DNA, 146 bp, Artificial Sequence
  Bisulfite Padlock Probe
  misc_feature 94, 95, 96, 97, 98, 99: n = A,T,C or G
gactggaagagcactgttaatatttaaatcatattaactacccaagttggaggctcatcgttcctattcaggcagatgttatcgaggtccgacnnnnnnaaaaccgccgataacgacacctctaacgatcggatacgcatgaggct

SEQ ID NO: 2064 - DNA, 146 bp, Artificial Sequence
  Bisulfite Padlock Probe
  misc_feature 94, 95, 96, 97, 98, 99: n = A,T,C or G
gactggaagagcactgttaatatttaaatcatattaactacccaagttggaggctcatcgttcctattcaggcagatgttatcgaggtccgacnnnnnnaaaaccgccgataacgacgcctctaacgatcggatacgcatgaggct

SEQ ID NO: 2065 - DNA, 146 bp, Artificial Sequence
  Bisulfite Padlock Probe
  misc_feature 93, 94, 95, 96, 97, 98: n = A,T,C or G
gactggaagagcactgttaatattttaatacttctactattaacgttggaggctcatcgttcctattcaggcagatgttatcgaggtccgacnnnnnnaaaataacccaatattttcccaaaacccgatcggatacgcatgaggct

SEQ ID NO: 2066 - DNA, 146 bp, Artificial Sequence
  Bisulfite Padlock Probe
  misc_feature 96, 97, 98, 99, 100, 101: n = A,T,C or G
gactggaagagcactgttaatattttacttaccaattcattaaaaacgttggaggctcatcgttcctattcaggcagatgttatcgaggtccgacnnnnnnaaaaaccccgaccgcataaaccctagatcggatacgcatgaggct

SEQ ID NO: 2067 - DNA, 146 bp, Artificial Sequence
  Bisulfite Padlock Probe
  misc_feature 96, 97, 98, 99, 100, 101: n = A,T,C or G
gactggaagagcactgttaatattttacttaccaattcgttaaaaacgttggaggctcatcgttcctattcaggcagatgttatcgaggtccgacnnnnnnaaaaaccccgaccgcgtaaaccctagatcggatacgcatgaggct

SEQ ID NO: 2068 - DNA, 146 bp, Artificial Sequence
  Bisulfite Padlock Probe
  misc_feature 95, 96, 97, 98, 99, 100: n = A,T,C or G
gactggaagagcactgttaatcaaaaaactccctaaaacaactaaagttggaggctcatcgttcctattcaggcagatgttatcgaggtccgacnnnnnnaaaaccgacaccaaaacaacactaccgatcggatacgcatgaggct

SEQ ID NO: 2069 - DNA, 146 bp, Artificial Sequence
  Bisulfite Padlock Probe
  misc_feature 96, 97, 98, 99, 100, 101: n = A,T,C or G
gactggaagagcactgttaatcaaatcaaatcaaaccacacattaatgttggaggctcatcgttcctattcaggcagatgttatcgaggtccgacnnnnnncacctaactttctcccttaaacaccgatcggatacgcatgaggct

SEQ ID NO: 2070 - DNA, 146 bp, Artificial Sequence
  Bisulfite Padlock Probe
  misc_feature 96, 97, 98, 99, 100, 101: n = A,T,C or G
gactggaagagcactgttaatcaaatcaaatcaaaccacacattaatgttggaggctcatcgttcctattcaggcagatgttatcgaggtccgacnnnnnncgcctaactttctcccttaaacaccgatcggatacgcatgaggct

SEQ ID NO: 2071 - DNA, 146 bp, Artificial Sequence
  Bisulfite Padlock Probe
  misc_feature 93, 94, 95, 96, 97, 98: n = A,T,C or G
gactggaagagcactgttaatcaacaaatcctccaaaaccttatgttggaggctcatcgttcctattcaggcagatgttatcgaggtccgacnnnnnntactacaacttaaccacccgaccacaacgatcggatacgcatgaggct

SEQ ID NO: 2072 - DNA, 146 bp, Artificial Sequence
  Bisulfite Padlock Probe
  misc_feature 93, 94, 95, 96, 97, 98: n = A,T,C or G
gactggaagagcactgttaatcaaccaaaaacaaaccccactaagttggaggctcatcgttcctattcaggcagatgttatcgaggtccgacnnnnnncaaaatccgaacgccaaataataaaaacgatcggatacgcatgaggct

SEQ ID NO: 2073 - DNA, 146 bp, Artificial Sequence
  Bisulfite Padlock Probe
  misc_feature 93, 94, 95, 96, 97, 98: n = A,T,C or G
gactggaagagcactgttaatcaaccaaaaacgaaccccactaagttggaggctcatcgttcctattcaggcagatgttatcgaggtccgacnnnnnncaaaatccgaacgccgaataataaaaacgatcggatacgcatgaggct

SEQ ID NO: 2074 - DNA, 146 bp, Artificial Sequence
  Bisulfite Padlock Probe
  misc_feature 92, 93, 94, 95, 96, 97: n = A,T,C or G
gactggaagagcactgttaatcaacccaaaaccaaaacaaaaagttggaggctcatcgttcctattcaggcagatgttatcgaggtccgacnnnnnnaaaaaccataactataatccaaaactactgatcggatacgcatgaggct

SEQ ID NO: 2075 - DNA, 146 bp, Artificial Sequence
  Bisulfite Padlock Probe
  misc_feature 92, 93, 94, 95, 96, 97: n = A,T,C or G
gactggaagagcactgttaatcaacccgaaaccaaaacaaaaagttggaggctcatcgttcctattcaggcagatgttatcgaggtccgacnnnnnnaaaaaccgtaactataatccaaaactactgatcggatacgcatgaggct

SEQ ID NO: 2076 - DNA, 146 bp, Artificial Sequence
  Bisulfite Padlock Probe
  misc_feature 93, 94, 95, 96, 97, 98: n = A,T,C or G
gactggaagagcactgttaatcaacgaatcctccaaaaccttatgttggaggctcatcgttcctattcaggcagatgttatcgaggtccgacnnnnnntactacaacttaaccacccgaccgcaacgatcggatacgcatgaggct

SEQ ID NO: 2077 - DNA, 146 bp, Artificial Sequence
  Bisulfite Padlock Probe
  misc_feature 92, 93, 94, 95, 96, 97: n = A,T,C or G
gactggaagagcactgttaatcaactcctacctcccatacaaagttggaggctcatcgttcctattcaggcagatgttatcgaggtccgacnnnnnnaaaaactaccgaacaaaaacaccccactagatcggatacgcatgaggct

SEQ ID NO: 2078 - DNA, 146 bp, Artificial Sequence
  Bisulfite Padlock Probe
  misc_feature 92, 93, 94, 95, 96, 97: n = A,T,C or G
gactggaagagcactgttaatcaactcctacctcccatacaaagttggaggctcatcgttcctattcaggcagatgttatcgaggtccgacnnnnnnaaaaactaccgaacaaaaacgccccactagatcggatacgcatgaggct

SEQ ID NO: 2079 - DNA, 146 bp, Artificial Sequence
  Bisulfite Padlock Probe
  misc_feature 92, 93, 94, 95, 96, 97: n = A,T,C or G
gactggaagagcactgttaatcaataacaaatctaaataaactgttggaggctcatcgttcctattcaggcagatgttatcgaggtccgacnnnnnnaacttaatttaaaatttcaaatatattttgatcggatacgcatgaggct

SEQ ID NO: 2080 - DNA, 146 bp, Artificial Sequence
  Bisulfite Padlock Probe
  misc_feature 96, 97, 98, 99, 100, 101: n = A,T,C or G
gactggaagagcactgttaatcacaacaactcaaacaccaaaccaccgttggaggctcatcgttcctattcaggcagatgttatcgaggtccgacnnnnnncccgaaacctcgcatacacaaaaccgatcggatacgcatgaggct

SEQ ID NO: 2081 - DNA, 146 bp, Artificial Sequence
  Bisulfite Padlock Probe
  misc_feature 94, 95, 96, 97, 98, 99: n = A,T,C or G
gactggaagagcactgttaatcacaatcccaaaaaccaaatacccgttggaggctcatcgttcctattcaggcagatgttatcgaggtccgacnnnnnnactataactttaaaactaccataaaaagatcggatacgcatgaggct

SEQ ID NO: 2082 - DNA, 146 bp, Artificial Sequence
  Bisulfite Padlock Probe
  misc_feature 94, 95, 96, 97, 98, 99: n = A,T,C or G
gactggaagagcactgttaatcacaatcccaaaaaccgaatacccgttggaggctcatcgttcctattcaggcagatgttatcgaggtccgacnnnnnnactataactttaaaactaccataaaaagatcggatacgcatgaggct

SEQ ID NO: 2083 - DNA, 146 bp, Artificial Sequence
  Bisulfite Padlock Probe
  misc_feature 96, 97, 98, 99, 100, 101: n = A,T,C or G
gactggaagagcactgttaatcacacaaccctaacaaaacaataaaagttggaggctcatcgttcctattcaggcagatgttatcgaggtccgacnnnnnntaaacgaacgaacgcactactcccagatcggatacgcatgaggct

SEQ ID NO: 2084 - DNA, 146 bp, Artificial Sequence
  Bisulfite Padlock Probe
  misc_feature 96, 97, 98, 99, 100, 101: n = A,T,C or G
gactggaagagcactgttaatcacacaaccctaacaaaacaataaaagttggaggctcatcgttcctattcaggcagatgttatcgaggtccgacnnnnnntaaacgaacgaacgcgctactcccagatcggatacgcatgaggct

SEQ ID NO: 2085 - DNA, 146 bp, Artificial Sequence
  Bisulfite Padlock Probe
  misc_feature 92, 93, 94, 95, 96, 97: n = A,T,C or G
gactggaagagcactgttaatcacccaaaccacgataaacaccgttggaggctcatcgttcctattcaggcagatgttatcgaggtccgacnnnnnnacgtaacgaaataaatatcgttaccacccgatcggatacgcatgaggct

SEQ ID NO: 2086 - DNA, 146 bp, Artificial Sequence
  Bisulfite Padlock Probe
  misc_feature 92, 93, 94, 95, 96, 97: n = A,T,C or G
gactggaagagcactgttaatcacccaaaccacgataaacgccgttggaggctcatcgttcctattcaggcagatgttatcgaggtccgacnnnnnnacgtaacgaaataaatatcgttaccgcccgatcggatacgcatgaggct

SEQ ID NO: 2087 - DNA, 146 bp, Artificial Sequence
  Bisulfite Padlock Probe
  misc_feature 94, 95, 96, 97, 98, 99: n = A,T,C or G
gactggaagagcactgttaatcactaacaacacttcctcctccccgttggaggctcatcgttcctattcaggcagatgttatcgaggtccgacnnnnnntcaaaaccaacaaaatctaaatatcacgatcggatacgcatgaggct

SEQ ID NO: 2088 - DNA, 146 bp, Artificial Sequence
  Bisulfite Padlock Probe
  misc_feature 92, 93, 94, 95, 96, 97: n = A,T,C or G
gactggaagagcactgttaatccaaaaacatcacctcaaattcgttggaggctcatcgttcctattcaggcagatgttatcgaggtccgacnnnnnnactacttcctaactctaaatataacctcagatcggatacgcatgaggct

SEQ ID NO: 2089 - DNA, 146 bp, Artificial Sequence
  Bisulfite Padlock Probe
  misc_feature 92, 93, 94, 95, 96, 97: n = A,T,C or G
gactggaagagcactgttaatccaaaaacatcgcctcaaattcgttggaggctcatcgttcctattcaggcagatgttatcgaggtccgacnnnnnnactacttcctaactctaaatataacctcagatcggatacgcatgaggct

SEQ ID NO: 2090 - DNA, 146 bp, Artificial Sequence
  Bisulfite Padlock Probe
  misc_feature 92, 93, 94, 95, 96, 97: n = A,T,C or G
gactggaagagcactgttaatccaaaaccaaaaacctttaactgttggaggctcatcgttcctattcaggcagatgttatcgaggtccgacnnnnnncctcttcctcccctactaatcctacttttgatcggatacgcatgaggct

SEQ ID NO: 2091 - DNA, 146 bp, Artificial Sequence
  Bisulfite Padlock Probe
  misc_feature 93, 94, 95, 96, 97, 98: n = A,T,C or G
gactggaagagcactgttaatccaaaaccaaaaacctttaacttgttggaggctcatcgttcctattcaggcagatgttatcgaggtccgacnnnnnnctcttcctcccctactaatcctacttttgatcggatacgcatgaggct

SEQ ID NO: 2092 - DNA, 146 bp, Artificial Sequence
  Bisulfite Padlock Probe
  misc_feature 92, 93, 94, 95, 96, 97: n = A,T,C or G
gactggaagagcactgttaatccaaactacactacaacaaaaagttggaggctcatcgttcctattcaggcagatgttatcgaggtccgacnnnnnnaacaactaaactcgaccgaaactacaaacgatcggatacgcatgaggct

SEQ ID NO: 2093 - DNA, 146 bp, Artificial Sequence
  Bisulfite Padlock Probe
  misc_feature 92, 93, 94, 95, 96, 97: n = A,T,C or G
gactggaagagcactgttaatccaaactacgctacaacaaaaagttggaggctcatcgttcctattcaggcagatgttatcgaggtccgacnnnnnnaacaactaaactcgaccgaaactacgaacgatcggatacgcatgaggct

SEQ ID NO: 2094 - DNA, 146 bp, Artificial Sequence
  Bisulfite Padlock Probe
  misc_feature 96, 97, 98, 99, 100, 101: n = A,T,C or G
gactggaagagcactgttaatccaacctactccgaaacctcaaacacgttggaggctcatcgttcctattcaggcagatgttatcgaggtccgacnnnnnnactccaaacgcgcaaaaccaaaaccgatcggatacgcatgaggct

SEQ ID NO: 2095 - DNA, 146 bp, Artificial Sequence
  Bisulfite Padlock Probe
  misc_feature 96, 97, 98, 99, 100, 101: n = A,T,C or G
gactggaagagcactgttaatccaacctactccgaaacctcgaacacgttggaggctcatcgttcctattcaggcagatgttatcgaggtccgacnnnnnnactccaaacgcgcaaaaccgaaaccgatcggatacgcatgaggct

SEQ ID NO: 2096 - DNA, 146 bp, Artificial Sequence
  Bisulfite Padlock Probe
  misc_feature 96, 97, 98, 99, 100, 101: n = A,T,C or G
gactggaagagcactgttaatccacgaaacgatcaaaacctaaaaccgttggaggctcatcgttcctattcaggcagatgttatcgaggtccgacnnnnnnaccccaaaatcccccaaaaacaaccgatcggatacgcatgaggct

SEQ ID NO: 2097 - DNA, 146 bp, Artificial Sequence
  Bisulfite Padlock Probe
  misc_feature 96, 97, 98, 99, 100, 101: n = A,T,C or G
gactggaagagcactgttaatccacgaaacgatcgaaacctaaaaccgttggaggctcatcgttcctattcaggcagatgttatcgaggtccgacnnnnnnaccccaaaatcccccaaaaacgaccgatcggatacgcatgaggct

SEQ ID NO: 2098 - DNA, 146 bp, Artificial Sequence
  Bisulfite Padlock Probe
  misc_feature 92, 93, 94, 95, 96, 97: n = A,T,C or G
gactggaagagcactgttaatcccaaaaacctacccaactaacgttggaggctcatcgttcctattcaggcagatgttatcgaggtccgacnnnnnnaacttaatccgcataactccgaccaaaccgatcggatacgcatgaggct

SEQ ID NO: 2099 - DNA, 146 bp, Artificial Sequence
  Bisulfite Padlock Probe
  misc_feature 92, 93, 94, 95, 96, 97: n = A,T,C or G
gactggaagagcactgttaatccccaacacctactccctaaacgttggaggctcatcgttcctattcaggcagatgttatcgaggtccgacnnnnnntacaacccgaactcaaacttcctatttacgatcggatacgcatgaggct

SEQ ID NO: 2100 - DNA, 146 bp, Artificial Sequence
  Bisulfite Padlock Probe
  misc_feature 92, 93, 94, 95, 96, 97: n = A,T,C or G
gactggaagagcactgttaatccccaacgcctactccctaaacgttggaggctcatcgttcctattcaggcagatgttatcgaggtccgacnnnnnntacaacccgaactcgaacttcctatttacgatcggatacgcatgaggct

SEQ ID NO: 2101 - DNA, 146 bp, Artificial Sequence
  Bisulfite Padlock Probe
  misc_feature 92, 93, 94, 95, 96, 97: n = A,T,C or G
gactggaagagcactgttaatcccctaaaacctaatttaacctgttggaggctcatcgttcctattcaggcagatgttatcgaggtccgacnnnnnnaaaaataacaaacaccaaaccccaaaaccgatcggatacgcatgaggct

SEQ ID NO: 2102 - DNA, 146 bp, Artificial Sequence
  Bisulfite Padlock Probe
  misc_feature 92, 93, 94, 95, 96, 97: n = A,T,C or G
gactggaagagcactgttaatcccctaaaacctaatttaacctgttggaggctcatcgttcctattcaggcagatgttatcgaggtccgacnnnnnnaaaaataacgaacaccaaaccccaaaaccgatcggatacgcatgaggct

SEQ ID NO: 2103 - DNA, 146 bp, Artificial Sequence
  Bisulfite Padlock Probe
  misc_feature 92, 93, 94, 95, 96, 97: n = A,T,C or G
gactggaagagcactgttaatcccgaaaacctacccaactaacgttggaggctcatcgttcctattcaggcagatgttatcgaggtccgacnnnnnnaacttaatccgcataactccgaccgaaccgatcggatacgcatgaggct

SEQ ID NO: 2104 - DNA, 146 bp, Artificial Sequence
  Bisulfite Padlock Probe
  misc_feature 93, 94, 95, 96, 97, 98: n = A,T,C or G
gactggaagagcactgttaatcccgcaactcaaactccctaaccgttggaggctcatcgttcctattcaggcagatgttatcgaggtccgacnnnnnnaaaacaaaacgcgctaaaccaaccaaaagatcggatacgcatgaggct

SEQ ID NO: 2105 - DNA, 146 bp, Artificial Sequence
  Bisulfite Padlock Probe
  misc_feature 93, 94, 95, 96, 97, 98: n = A,T,C or G
gactggaagagcactgttaatcccgcaactcgaactccctaaccgttggaggctcatcgttcctattcaggcagatgttatcgaggtccgacnnnnnnaaaacaaaacgcgctaaaccgaccaaaagatcggatacgcatgaggct

SEQ ID NO: 2106 - DNA, 146 bp, Artificial Sequence
  Bisulfite Padlock Probe
  misc_feature 95, 96, 97, 98, 99, 100: n = A,T,C or G
gactggaagagcactgttaatcccttaaaataaaaataaaaacaaagttggaggctcatcgttcctattcaggcagatgttatcgaggtccgacnnnnnnaaaaacgaaccttaacataattactcgatcggatacgcatgaggct

SEQ ID NO: 2107 - DNA, 146 bp, Artificial Sequence
  Bisulfite Padlock Probe
  misc_feature 95, 96, 97, 98, 99, 100: n = A,T,C or G
gactggaagagcactgttaatcccttaaaataaaaataaaaacaaagttggaggctcatcgttcctattcaggcagatgttatcgaggtccgacnnnnnnaaaaacgaaccttaacgtaattactcgatcggatacgcatgaggct

SEQ ID NO: 2108 - DNA, 146 bp, Artificial Sequence
  Bisulfite Padlock Probe
  misc_feature 92, 93, 94, 95, 96, 97: n = A,T,C or G
gactggaagagcactgttaatccgacaaatacactaaatacccgttggaggctcatcgttcctattcaggcagatgttatcgaggtccgacnnnnnntaaacataacaaaaacccacaccacccccgatcggatacgcatgaggct

SEQ ID NO: 2109 - DNA, 146 bp, Artificial Sequence
  Bisulfite Padlock Probe
  misc_feature 92, 93, 94, 95, 96, 97: n = A,T,C or G
gactggaagagcactgttaatccgacaaatacgctaaatacccgttggaggctcatcgttcctattcaggcagatgttatcgaggtccgacnnnnnntaaacataacaaaaacccacaccacccccgatcggatacgcatgaggct

SEQ ID NO: 2110 - DNA, 146 bp, Artificial Sequence
  Bisulfite Padlock Probe
  misc_feature 96, 97, 98, 99, 100, 101: n = A,T,C or G
gactggaagagcactgttaatccgataaactctaaacaaatccaaaagttggaggctcatcgttcctattcaggcagatgttatcgaggtccgacnnnnnnaataaacccctcccaaaacaccttcgatcggatacgcatgaggct

SEQ ID NO: 2111 - DNA, 146 bp, Artificial Sequence
  Bisulfite Padlock Probe
  misc_feature 96, 97, 98, 99, 100, 101: n = A,T,C or G
gactggaagagcactgttaatccgataaactctaaacgaatccaaaagttggaggctcatcgttcctattcaggcagatgttatcgaggtccgacnnnnnnaataaacccctcccgaaacaccttcgatcggatacgcatgaggct

SEQ ID NO: 2112 - DNA, 146 bp, Artificial Sequence
  Bisulfite Padlock Probe
  misc_feature 93, 94, 95, 96, 97, 98: n = A,T,C or G
gactggaagagcactgttaatcctaacgttaaactcgaccaaccgttggaggctcatcgttcctattcaggcagatgttatcgaggtccgacnnnnnnccctcgcccgaaacgaatctacataaacgatcggatacgcatgaggct

SEQ ID NO: 2113 - DNA, 146 bp, Artificial Sequence
  Bisulfite Padlock Probe
  misc_feature 93, 94, 95, 96, 97, 98: n = A,T,C or G
gactggaagagcactgttaatcctaacgttaaactcgaccgaccgttggaggctcatcgttcctattcaggcagatgttatcgaggtccgacnnnnnnccctcgcccgaaacgaatctacgtaaacgatcggatacgcatgaggct

SEQ ID NO: 2114 - DNA, 146 bp, Artificial Sequence
  Bisulfite Padlock Probe
  misc_feature 96, 97, 98, 99, 100, 101: n = A,T,C or G
gactggaagagcactgttaatcctaactacattcgacccgcacaatcgttggaggctcatcgttcctattcaggcagatgttatcgaggtccgacnnnnnnctacgactccgacccgatacaaaccgatcggatacgcatgaggct

SEQ ID NO: 2115 - DNA, 146 bp, Artificial Sequence
  Bisulfite Padlock Probe
  misc_feature 96, 97, 98, 99, 100, 101: n = A,T,C or G
gactggaagagcactgttaatcctaactacattcgacccgcacgatcgttggaggctcatcgttcctattcaggcagatgttatcgaggtccgacnnnnnnctacgactccgacccgatacgaaccgatcggatacgcatgaggct

SEQ ID NO: 2116 - DNA, 146 bp, Artificial Sequence
  Bisulfite Padlock Probe
  misc_feature 96, 97, 98, 99, 100, 101: n = A,T,C or G
gactggaagagcactgttaatcctatcctacatctctccaaatttccgttggaggctcatcgttcctattcaggcagatgttatcgaggtccgacnnnnnnaaaaacactataaccccgacaaaacgatcggatacgcatgaggct

SEQ ID NO: 2117 - DNA, 146 bp, Artificial Sequence
  Bisulfite Padlock Probe
  misc_feature 96, 97, 98, 99, 100, 101: n = A,T,C or G
gactggaagagcactgttaatcctatcctacgtctctccaaatttccgttggaggctcatcgttcctattcaggcagatgttatcgaggtccgacnnnnnnaaaaacactataaccccgacgaaacgatcggatacgcatgaggct

SEQ ID NO: 2118 - DNA, 146 bp, Artificial Sequence
  Bisulfite Padlock Probe
  misc_feature 92, 93, 94, 95, 96, 97: n = A,T,C or G
gactggaagagcactgttaatcctcacacaacctcctaaacccgttggaggctcatcgttcctattcaggcagatgttatcgaggtccgacnnnnnnaacaatacgcctacaactccaaatctcaagatcggatacgcatgaggct

SEQ ID NO: 2119 - DNA, 146 bp, Artificial Sequence
  Bisulfite Padlock Probe
  misc_feature 92, 93, 94, 95, 96, 97: n = A,T,C or G
gactggaagagcactgttaatcctcacacgacctcctaaacccgttggaggctcatcgttcctattcaggcagatgttatcgaggtccgacnnnnnnaacaatacgcctacaactccgaatctcaagatcggatacgcatgaggct

SEQ ID NO: 2120 - DNA, 146 bp, Artificial Sequence
  Bisulfite Padlock Probe
  misc_feature 93, 94, 95, 96, 97, 98: n = A,T,C or G
gactggaagagcactgttaatcctcacctaaatcctaaaaccccgttggaggctcatcgttcctattcaggcagatgttatcgaggtccgacnnnnnnaaaccgaaaaccaataaaaataatatccgatcggatacgcatgaggct

SEQ ID NO: 2121 - DNA, 146 bp, Artificial Sequence
  Bisulfite Padlock Probe
  misc_feature 93, 94, 95, 96, 97, 98: n = A,T,C or G
gactggaagagcactgttaatcctcacctaaatcctaaaaccccgttggaggctcatcgttcctattcaggcagatgttatcgaggtccgacnnnnnnaaaccgaaaaccgataaaaataatatccgatcggatacgcatgaggct

SEQ ID NO: 2122 - DNA, 146 bp, Artificial Sequence
  Bisulfite Padlock Probe
  misc_feature 95, 96, 97, 98, 99, 100: n = A,T,C or G
gactggaagagcactgttaatcgaaaaactccctaaaacaactaaagttggaggctcatcgttcctattcaggcagatgttatcgaggtccgacnnnnnnaaaaccgacaccaaaacaacgctaccgatcggatacgcatgaggct

SEQ ID NO: 2123 - DNA, 146 bp, Artificial Sequence
  Bisulfite Padlock Probe
  misc_feature 96, 97, 98, 99, 100, 101: n = A,T,C or G
gactggaagagcactgttaatcgaacgactcaaacaaaaaccaaaaagttggaggctcatcgttcctattcaggcagatgttatcgaggtccgacnnnnnnaacgtaaacacaactaaataaactcgatcggatacgcatgaggct

SEQ ID NO: 2124 - DNA, 146 bp, Artificial Sequence
  Bisulfite Padlock Probe
  misc_feature 96, 97, 98, 99, 100, 101: n = A,T,C or G
gactggaagagcactgttaatcgaacgactcaaacaaaaaccgaaaagttggaggctcatcgttcctattcaggcagatgttatcgaggtccgacnnnnnnaacgtaaacacgactaaataaactcgatcggatacgcatgaggct

SEQ ID NO: 2125 - DNA, 146 bp, Artificial Sequence
  Bisulfite Padlock Probe
  misc_feature 96, 97, 98, 99, 100, 101: n = A,T,C or G
gactggaagagcactgttaatcgcaacaactcaaacaccaaaccaccgttggaggctcatcgttcctattcaggcagatgttatcgaggtccgacnnnnnncccgaaacctcgcatacacgaaaccgatcggatacgcatgaggct

SEQ ID NO: 2126 - DNA, 146 bp, Artificial Sequence
  Bisulfite Padlock Probe
  misc_feature 93, 94, 95, 96, 97, 98: n = A,T,C or G
gactggaagagcactgttaatctaaaaacaaacaaaaataaaaagttggaggctcatcgttcctattcaggcagatgttatcgaggtccgacnnnnnnaaacactaaaaacctactacaaccctaagatcggatacgcatgaggct

SEQ ID NO: 2127 - DNA, 146 bp, Artificial Sequence
  Bisulfite Padlock Probe
  misc_feature 93, 94, 95, 96, 97, 98: n = A,T,C or G
gactggaagagcactgttaatctaaaaacgaacaaaaataaaaagttggaggctcatcgttcctattcaggcagatgttatcgaggtccgacnnnnnnaaacgctaaaaacctactacaaccctaagatcggatacgcatgaggct

SEQ ID NO: 2128 - DNA, 146 bp, Artificial Sequence
  Bisulfite Padlock Probe
  misc_feature 92, 93, 94, 95, 96, 97: n = A,T,C or G
gactggaagagcactgttaatctacgaacccgcgacaaaaaacgttggaggctcatcgttcctattcaggcagatgttatcgaggtccgacnnnnnnaccctaaaaacaaaactaacccaaaaccagatcggatacgcatgaggct

SEQ ID NO: 2129 - DNA, 146 bp, Artificial Sequence
  Bisulfite Padlock Probe
  misc_feature 92, 93, 94, 95, 96, 97: n = A,T,C or G
gactggaagagcactgttaatctacgaacccgcgacgaaaaacgttggaggctcatcgttcctattcaggcagatgttatcgaggtccgacnnnnnnaccctaaaaacaaaactaacccaaaaccagatcggatacgcatgaggct

SEQ ID NO: 2130 - DNA, 146 bp, Artificial Sequence
  Bisulfite Padlock Probe
  misc_feature 93, 94, 95, 96, 97, 98: n = A,T,C or G
gactggaagagcactgttaatctacgcgaatctcacatccaaccgttggaggctcatcgttcctattcaggcagatgttatcgaggtccgacnnnnnnaaaaacaaaccgaacaaaccactcacccgatcggatacgcatgaggct

SEQ ID NO: 2131 - DNA, 146 bp, Artificial Sequence
  Bisulfite Padlock Probe
  misc_feature 93, 94, 95, 96, 97, 98: n = A,T,C or G
gactggaagagcactgttaatctacgcgaatctcgcatccaaccgttggaggctcatcgttcctattcaggcagatgttatcgaggtccgacnnnnnnaaaaacaaaccgaacgaaccactcacccgatcggatacgcatgaggct

SEQ ID NO: 2132 - DNA, 146 bp, Artificial Sequence
  Bisulfite Padlock Probe
  misc_feature 93, 94, 95, 96, 97, 98: n = A,T,C or G
gactggaagagcactgttaatctatcccctcaactctccattccgttggaggctcatcgttcctattcaggcagatgttatcgaggtccgacnnnnnnacccaatactcaaacaatatctaaatttgatcggatacgcatgaggct

SEQ ID NO: 2133 - DNA, 146 bp, Artificial Sequence
  Bisulfite Padlock Probe
  misc_feature 92, 93, 94, 95, 96, 97: n = A,T,C or G
gactggaagagcactgttaatctcaacctacaaaacccaaaacgttggaggctcatcgttcctattcaggcagatgttatcgaggtccgacnnnnnnaataatacttcccgcaacctacttctctcgatcggatacgcatgaggct

SEQ ID NO: 2134 - DNA, 146 bp, Artificial Sequence
  Bisulfite Padlock Probe
  misc_feature 92, 93, 94, 95, 96, 97: n = A,T,C or G
gactggaagagcactgttaatctcaacctacaaaacccgaaacgttggaggctcatcgttcctattcaggcagatgttatcgaggtccgacnnnnnnaataatacttcccgcgacctacttctctcgatcggatacgcatgaggct

SEQ ID NO: 2135 - DNA, 146 bp, Artificial Sequence
  Bisulfite Padlock Probe
  misc_feature 92, 93, 94, 95, 96, 97: n = A,T,C or G
gactggaagagcactgttaatctccgccaaatctacaacccccgttggaggctcatcgttcctattcaggcagatgttatcgaggtccgacnnnnnnaattaactaaaacatcccgacacaaaatagatcggatacgcatgaggct

SEQ ID NO: 2136 - DNA, 146 bp, Artificial Sequence
  Bisulfite Padlock Probe
  misc_feature 92, 93, 94, 95, 96, 97: n = A,T,C or G
gactggaagagcactgttaatctccgccgaatctacaacccccgttggaggctcatcgttcctattcaggcagatgttatcgaggtccgacnnnnnnaattaactaaaacatcccgacgcaaaatagatcggatacgcatgaggct

SEQ ID NO: 2137 - DNA, 146 bp, Artificial Sequence
  Bisulfite Padlock Probe
  misc_feature 94, 95, 96, 97, 98, 99: n = A,T,C or G
gactggaagagcactgttaatctccgtacgaccgacacattaaccgttggaggctcatcgttcctattcaggcagatgttatcgaggtccgacnnnnnnaaacctacgaaacctaaaccaaaaaccgatcggatacgcatgaggct

SEQ ID NO: 2138 - DNA, 146 bp, Artificial Sequence
  Bisulfite Padlock Probe
  misc_feature 94, 95, 96, 97, 98, 99: n = A,T,C or G
gactggaagagcactgttaatctccgtacgaccgacgcattaaccgttggaggctcatcgttcctattcaggcagatgttatcgaggtccgacnnnnnnaaacctacgaaacctaaaccgaaaaccgatcggatacgcatgaggct

SEQ ID NO: 2139 - DNA, 146 bp, Artificial Sequence
  Bisulfite Padlock Probe
  misc_feature 93, 94, 95, 96, 97, 98: n = A,T,C or G
gactggaagagcactgttaatctccttacacacgcaacacttacgttggaggctcatcgttcctattcaggcagatgttatcgaggtccgacnnnnnncccgcctcaaataacaatatcccaaaaagatcggatacgcatgaggct

SEQ ID NO: 2140 - DNA, 146 bp, Artificial Sequence
  Bisulfite Padlock Probe
  misc_feature 93, 94, 95, 96, 97, 98: n = A,T,C or G
gactggaagagcactgttaatctccttacacacgcaacgcttacgttggaggctcatcgttcctattcaggcagatgttatcgaggtccgacnnnnnncccgcctcaaataacgatatcccaaaaagatcggatacgcatgaggct

SEQ ID NO: 2141 - DNA, 146 bp, Artificial Sequence
  Bisulfite Padlock Probe
  misc_feature 95, 96, 97, 98, 99, 100: n = A,T,C or G
gactggaagagcactgttaatctcgtaacgcacatactactccaccgttggaggctcatcgttcctattcaggcagatgttatcgaggtccgacnnnnnnaccaaataaaaatactacaaataaccgatcggatacgcatgaggct

SEQ ID NO: 2142 - DNA, 146 bp, Artificial Sequence
  Bisulfite Padlock Probe
  misc_feature 95, 96, 97, 98, 99, 100: n = A,T,C or G
gactggaagagcactgttaatctcgtaacgcacgtactactccaccgttggaggctcatcgttcctattcaggcagatgttatcgaggtccgacnnnnnnaccaaataaaaatactacgaataaccgatcggatacgcatgaggct

SEQ ID NO: 2143 - DNA, 146 bp, Artificial Sequence
  Bisulfite Padlock Probe
  misc_feature 92, 93, 94, 95, 96, 97: n = A,T,C or G
gactggaagagcactgttaatctctacacaaaatccaaaatacgttggaggctcatcgttcctattcaggcagatgttatcgaggtccgacnnnnnnattacaatcctttcatttaccacaacatagatcggatacgcatgaggct

SEQ ID NO: 2144 - DNA, 146 bp, Artificial Sequence
  Bisulfite Padlock Probe
  misc_feature 92, 93, 94, 95, 96, 97: n = A,T,C or G
gactggaagagcactgttaatctctacacgaaatccaaaatacgttggaggctcatcgttcctattcaggcagatgttatcgaggtccgacnnnnnnattacaatcctttcatttaccacaacatagatcggatacgcatgaggct

SEQ ID NO: 2145 - DNA, 146 bp, Artificial Sequence
  Bisulfite Padlock Probe
  misc_feature 96, 97, 98, 99, 100, 101: n = A,T,C or G
gactggaagagcactgttaattaaaccaccttttactttacaaataagttggaggctcatcgttcctattcaggcagatgttatcgaggtccgacnnnnnncgaaactaaaccaacaaaaaccaacgatcggatacgcatgaggct

SEQ ID NO: 2146 - DNA, 146 bp, Artificial Sequence
  Bisulfite Padlock Probe
  misc_feature 96, 97, 98, 99, 100, 101: n = A,T,C or G
gactggaagagcactgttaattaaaccaccttttactttacaaataagttggaggctcatcgttcctattcaggcagatgttatcgaggtccgacnnnnnncgaaactaaaccgacaaaaaccaacgatcggatacgcatgaggct

SEQ ID NO: 2147 - DNA, 146 bp, Artificial Sequence
  Bisulfite Padlock Probe
  misc_feature 92, 93, 94, 95, 96, 97: n = A,T,C or G
gactggaagagcactgttaattaaacttaaatcataacccaaagttggaggctcatcgttcctattcaggcagatgttatcgaggtccgacnnnnnnaacccaccctaaccgaaaccaaacaaaaagatcggatacgcatgaggct

SEQ ID NO: 2148 - DNA, 146 bp, Artificial Sequence
  Bisulfite Padlock Probe
  misc_feature 92, 93, 94, 95, 96, 97: n = A,T,C or G
gactggaagagcactgttaattaaacttaaatcgtaacccaaagttggaggctcatcgttcctattcaggcagatgttatcgaggtccgacnnnnnnaacccaccctaaccgaaaccgaacaaaaagatcggatacgcatgaggct

SEQ ID NO: 2149 - DNA, 146 bp, Artificial Sequence
  Bisulfite Padlock Probe
  misc_feature 95, 96, 97, 98, 99, 100: n = A,T,C or G
gactggaagagcactgttaattaacgaataaatcataaaatcccacgttggaggctcatcgttcctattcaggcagatgttatcgaggtccgacnnnnnngaacaaccaaacaacacccaacccaagatcggatacgcatgaggct

SEQ ID NO: 2150 - DNA, 146 bp, Artificial Sequence
  Bisulfite Padlock Probe
  misc_feature 95, 96, 97, 98, 99, 100: n = A,T,C or G
gactggaagagcactgttaattaacgaataaatcgtaaaatcccacgttggaggctcatcgttcctattcaggcagatgttatcgaggtccgacnnnnnngaacaaccgaacaacacccaacccaagatcggatacgcatgaggct

SEQ ID NO: 2151 - DNA, 146 bp, Artificial Sequence
  Bisulfite Padlock Probe
  misc_feature 95, 96, 97, 98, 99, 100: n = A,T,C or G
gactggaagagcactgttaattaactcctccacctcccaaattcctgttggaggctcatcgttcctattcaggcagatgttatcgaggtccgacnnnnnnctacctcctcccaacaaaccaacctcgatcggatacgcatgaggct

SEQ ID NO: 2152 - DNA, 146 bp, Artificial Sequence
  Bisulfite Padlock Probe
  misc_feature 95, 96, 97, 98, 99, 100: n = A,T,C or G
gactggaagagcactgttaattaactcctccacctcccaaattcctgttggaggctcatcgttcctattcaggcagatgttatcgaggtccgacnnnnnnctacctcctcccaacaaaccgacctcgatcggatacgcatgaggct

SEQ ID NO: 2153 - DNA, 146 bp, Artificial Sequence
  Bisulfite Padlock Probe
  misc_feature 95, 96, 97, 98, 99, 100: n = A,T,C or G
gactggaagagcactgttaattacaacaaatcccaaataataacacgttggaggctcatcgttcctattcaggcagatgttatcgaggtccgacnnnnnnaccgccaaaaatttacctcccaaaaagatcggatacgcatgaggct

SEQ ID NO: 2154 - DNA, 146 bp, Artificial Sequence
  Bisulfite Padlock Probe
  misc_feature 95, 96, 97, 98, 99, 100: n = A,T,C or G
gactggaagagcactgttaattacaacaaatcccaaataataacacgttggaggctcatcgttcctattcaggcagatgttatcgaggtccgacnnnnnnaccgccgaaaatttacctcccaaaaagatcggatacgcatgaggct

SEQ ID NO: 2155 - DNA, 146 bp, Artificial Sequence
  Bisulfite Padlock Probe
  misc_feature 96, 97, 98, 99, 100, 101: n = A,T,C or G
gactggaagagcactgttaattacatcataaaactttcacctacaaagttggaggctcatcgttcctattcaggcagatgttatcgaggtccgacnnnnnntatataaatttcccccgtacaccccgatcggatacgcatgaggct

SEQ ID NO: 2156 - DNA, 146 bp, Artificial Sequence
  Bisulfite Padlock Probe
  misc_feature 96, 97, 98, 99, 100, 101: n = A,T,C or G
gactggaagagcactgttaattacatcgtaaaactttcacctacaaagttggaggctcatcgttcctattcaggcagatgttatcgaggtccgacnnnnnntatataaatttcccccgtacgccccgatcggatacgcatgaggct

SEQ ID NO: 2157 - DNA, 146 bp, Artificial Sequence
  Bisulfite Padlock Probe
  misc_feature 92, 93, 94, 95, 96, 97: n = A,T,C or G
gactggaagagcactgttaattacattacaataaataaacaacgttggaggctcatcgttcctattcaggcagatgttatcgaggtccgacnnnnnncaaaacccgcgcgaatttaaacccaatacgatcggatacgcatgaggct

SEQ ID NO: 2158 - DNA, 146 bp, Artificial Sequence
  Bisulfite Padlock Probe
  misc_feature 92, 93, 94, 95, 96, 97: n = A,T,C or G
gactggaagagcactgttaattacattacaataaataaacgacgttggaggctcatcgttcctattcaggcagatgttatcgaggtccgacnnnnnncaaaacccgcgcgaatttaaacccgatacgatcggatacgcatgaggct

SEQ ID NO: 2159 - DNA, 146 bp, Artificial Sequence
  Bisulfite Padlock Probe
  misc_feature 93, 94, 95, 96, 97, 98: n = A,T,C or G
gactggaagagcactgttaattaccgaaatcgcccaaatactacgttggaggctcatcgttcctattcaggcagatgttatcgaggtccgacnnnnnnttcccgttctccacactaacctaattacgatcggatacgcatgaggct

SEQ ID NO: 2160 - DNA, 146 bp, Artificial Sequence
  Bisulfite Padlock Probe
  misc_feature 93, 94, 95, 96, 97, 98: n = A,T,C or G
gactggaagagcactgttaattaccgaaatcgcccgaatactacgttggaggctcatcgttcctattcaggcagatgttatcgaggtccgacnnnnnnttcccgttctccacgctaacctaattacgatcggatacgcatgaggct

SEQ ID NO: 2161 - DNA, 146 bp, Artificial Sequence
  Bisulfite Padlock Probe
  misc_feature 92, 93, 94, 95, 96, 97: n = A,T,C or G
gactggaagagcactgttaattacttcccattccctctacaacgttggaggctcatcgttcctattcaggcagatgttatcgaggtccgacnnnnnnaaaaatcaatcatattaatactaaaataagatcggatacgcatgaggct

SEQ ID NO: 2162 - DNA, 146 bp, Artificial Sequence
  Bisulfite Padlock Probe
  misc_feature 92, 93, 94, 95, 96, 97: n = A,T,C or G
gactggaagagcactgttaattacttcccattccctctacaacgttggaggctcatcgttcctattcaggcagatgttatcgaggtccgacnnnnnnaaaaatcaatcgtattaatactaaaataagatcggatacgcatgaggct

SEQ ID NO: 2163 - DNA, 146 bp, Artificial Sequence
  Bisulfite Padlock Probe
  misc_feature 92, 93, 94, 95, 96, 97: n = A,T,C or G
gactggaagagcactgttaattcaaaacttccaacaatctacagttggaggctcatcgttcctattcaggcagatgttatcgaggtccgacnnnnnnaaaactacccaatcccctaaacctctaccgatcggatacgcatgaggct

SEQ ID NO: 2164 - DNA, 146 bp, Artificial Sequence
  Bisulfite Padlock Probe
  misc_feature 92, 93, 94, 95, 96, 97: n = A,T,C or G
gactggaagagcactgttaattcaacaccgcgaaccaaacaacgttggaggctcatcgttcctattcaggcagatgttatcgaggtccgacnnnnnnaaaaactaaactacgcctccccacacaatgatcggatacgcatgaggct

SEQ ID NO: 2165 - DNA, 146 bp, Artificial Sequence
  Bisulfite Padlock Probe
  misc_feature 92, 93, 94, 95, 96, 97: n = A,T,C or G
gactggaagagcactgttaattcaacaccgcgaaccgaacaacgttggaggctcatcgttcctattcaggcagatgttatcgaggtccgacnnnnnnaaaaactaaactacgcctccccacgcaatgatcggatacgcatgaggct

SEQ ID NO: 2166 - DNA, 146 bp, Artificial Sequence
  Bisulfite Padlock Probe
  misc_feature 92, 93, 94, 95, 96, 97: n = A,T,C or G
gactggaagagcactgttaattcacaacacaacctacattcccgttggaggctcatcgttcctattcaggcagatgttatcgaggtccgacnnnnnncccttacctccaacaactacacataactcgatcggatacgcatgaggct

SEQ ID NO: 2167 - DNA, 146 bp, Artificial Sequence
  Bisulfite Padlock Probe
  misc_feature 92, 93, 94, 95, 96, 97: n = A,T,C or G
gactggaagagcactgttaattcacaacgcaacctacattcccgttggaggctcatcgttcctattcaggcagatgttatcgaggtccgacnnnnnncccttacctccaacaactacacgtaactcgatcggatacgcatgaggct

SEQ ID NO: 2168 - DNA, 146 bp, Artificial Sequence
  Bisulfite Padlock Probe
  misc_feature 93, 94, 95, 96, 97, 98: n = A,T,C or G
gactggaagagcactgttaattcccataaacccctactaaataagttggaggctcatcgttcctattcaggcagatgttatcgaggtccgacnnnnnnaacttaacacctacttttctactatttagatcggatacgcatgaggct

SEQ ID NO: 2169 - DNA, 146 bp, Artificial Sequence
  Bisulfite Padlock Probe
  misc_feature 93, 94, 95, 96, 97, 98: n = A,T,C or G
gactggaagagcactgttaattcccgtaaacccctactaaataagttggaggctcatcgttcctattcaggcagatgttatcgaggtccgacnnnnnnaacttaacgcctacttttctactatttagatcggatacgcatgaggct

SEQ ID NO: 2170 - DNA, 146 bp, Artificial Sequence
  Bisulfite Padlock Probe
  misc_feature 92, 93, 94, 95, 96, 97: n = A,T,C or G
gactggaagagcactgttaattcgaaaaacccatatacttaacgttggaggctcatcgttcctattcaggcagatgttatcgaggtccgacnnnnnncaaaactaaacaaattcactataaaaaccgatcggatacgcatgaggct

SEQ ID NO: 2171 - DNA, 146 bp, Artificial Sequence
  Bisulfite Padlock Probe
  misc_feature 92, 93, 94, 95, 96, 97: n = A,T,C or G
gactggaagagcactgttaattcgaaaaacccgtatacttaacgttggaggctcatcgttcctattcaggcagatgttatcgaggtccgacnnnnnncaaaactaaacgaattcactataaaaaccgatcggatacgcatgaggct

SEQ ID NO: 2172 - DNA, 146 bp, Artificial Sequence
  Bisulfite Padlock Probe
  misc_feature 92, 93, 94, 95, 96, 97: n = A,T,C or G
gactggaagagcactgttaattcgacgccacctccatcaaaacgttggaggctcatcgttcctattcaggcagatgttatcgaggtccgacnnnnnncgaaaccgacccgtaaaaacaactaaaaagatcggatacgcatgaggct

SEQ ID NO: 2173 - DNA, 146 bp, Artificial Sequence
  Bisulfite Padlock Probe
  misc_feature 92, 93, 94, 95, 96, 97: n = A,T,C or G
gactggaagagcactgttaattcgacgccgcctccatcaaaacgttggaggctcatcgttcctattcaggcagatgttatcgaggtccgacnnnnnncgaaaccgacccgtaaaaacgactaaaaagatcggatacgcatgaggct

SEQ ID NO: 2174 - DNA, 146 bp, Artificial Sequence
  Bisulfite Padlock Probe
  misc_feature 93, 94, 95, 96, 97, 98: n = A,T,C or G
gactggaagagcactgttaattcgcacaaatattccgcatttctgttggaggctcatcgttcctattcaggcagatgttatcgaggtccgacnnnnnnacctacgataccacaaaaacaaaacctagatcggatacgcatgaggct

SEQ ID NO: 2175 - DNA, 146 bp, Artificial Sequence
  Bisulfite Padlock Probe
  misc_feature 93, 94, 95, 96, 97, 98: n = A,T,C or G
gactggaagagcactgttaattcgcacaaatattccgcgtttctgttggaggctcatcgttcctattcaggcagatgttatcgaggtccgacnnnnnnacctacgataccacaaaaacgaaacctagatcggatacgcatgaggct

SEQ ID NO: 2176 - DNA, 146 bp, Artificial Sequence
  Bisulfite Padlock Probe
  misc_feature 92, 93, 94, 95, 96, 97: n = A,T,C or G
gactggaagagcactgttaattctaaatacacactaaccctacgttggaggctcatcgttcctattcaggcagatgttatcgaggtccgacnnnnnnaattaaaaccaaaaattcccaaaaatatagatcggatacgcatgaggct

SEQ ID NO: 2177 - DNA, 146 bp, Artificial Sequence
  Bisulfite Padlock Probe
  misc_feature 92, 93, 94, 95, 96, 97: n = A,T,C or G
gactggaagagcactgttaattctaaatacacgctaaccctacgttggaggctcatcgttcctattcaggcagatgttatcgaggtccgacnnnnnnaattaaaaccaaaaattcccaaaaatatagatcggatacgcatgaggct

SEQ ID NO: 2178 - DNA, 146 bp, Artificial Sequence
  Bisulfite Padlock Probe
  misc_feature 95, 96, 97, 98, 99, 100: n = A,T,C or G
gactggaagagcactgttaattctacactaccaaccatttcctctcgttggaggctcatcgttcctattcaggcagatgttatcgaggtccgacnnnnnncaaataaccaaccacgcgaacacaaagatcggatacgcatgaggct

SEQ ID NO: 2179 - DNA, 146 bp, Artificial Sequence
  Bisulfite Padlock Probe
  misc_feature 95, 96, 97, 98, 99, 100: n = A,T,C or G
gactggaagagcactgttaattctacactaccaaccgtttcctctcgttggaggctcatcgttcctattcaggcagatgttatcgaggtccgacnnnnnncaaataaccaaccacgcgaacacgaagatcggatacgcatgaggct

SEQ ID NO: 2180 - DNA, 146 bp, Artificial Sequence
  Bisulfite Padlock Probe
  misc_feature 96, 97, 98, 99, 100, 101: n = A,T,C or G
gactggaagagcactgttaattctataactataaaaaccatttctatgttggaggctcatcgttcctattcaggcagatgttatcgaggtccgacnnnnnncccccgtacctctccacaaaaactagatcggatacgcatgaggct

SEQ ID NO: 2181 - DNA, 146 bp, Artificial Sequence
  Bisulfite Padlock Probe
  misc_feature 96, 97, 98, 99, 100, 101: n = A,T,C or G
gactggaagagcactgttaattctataactataaaaaccgtttctatgttggaggctcatcgttcctattcaggcagatgttatcgaggtccgacnnnnnncccccgtacctctccgcaaaaactagatcggatacgcatgaggct

SEQ ID NO: 2182 - DNA, 146 bp, Artificial Sequence
  Bisulfite Padlock Probe
  misc_feature 96, 97, 98, 99, 100, 101: n = A,T,C or G
gactggaagagcactgttaattctcctcgatctccaaaaaatcctacgttggaggctcatcgttcctattcaggcagatgttatcgaggtccgacnnnnnnaccgaacgaactcaaaaccctaaacgatcggatacgcatgaggct

SEQ ID NO: 2183 - DNA, 146 bp, Artificial Sequence
  Bisulfite Padlock Probe
  misc_feature 96, 97, 98, 99, 100, 101: n = A,T,C or G
gactggaagagcactgttaattctcctcgatctccgaaaaatcctacgttggaggctcatcgttcctattcaggcagatgttatcgaggtccgacnnnnnnaccgaacgaactcgaaaccctaaacgatcggatacgcatgaggct

SEQ ID NO: 2184 - DNA, 146 bp, Artificial Sequence
  Bisulfite Padlock Probe
  misc_feature 92, 93, 94, 95, 96, 97: n = A,T,C or G
gactggaagagcactgttaatttaaaaatatctaaccctatccgttggaggctcatcgttcctattcaggcagatgttatcgaggtccgacnnnnnncctcccaaacaaaactacaactcaataccgatcggatacgcatgaggct

SEQ ID NO: 2185 - DNA, 146 bp, Artificial Sequence
  Bisulfite Padlock Probe
  misc_feature 92, 93, 94, 95, 96, 97: n = A,T,C or G
gactggaagagcactgttaatttaaaaatatctaaccctatccgttggaggctcatcgttcctattcaggcagatgttatcgaggtccgacnnnnnncctcccaaacgaaactacaactcaataccgatcggatacgcatgaggct

SEQ ID NO: 2186 - DNA, 146 bp, Artificial Sequence
  Bisulfite Padlock Probe
  misc_feature 96, 97, 98, 99, 100, 101: n = A,T,C or G
gactggaagagcactgttaatttaaaaatctaaacttcccccaaaacgttggaggctcatcgttcctattcaggcagatgttatcgaggtccgacnnnnnnacccgaactccgaaacaaaaaactcgatcggatacgcatgaggct

SEQ ID NO: 2187 - DNA, 146 bp, Artificial Sequence
  Bisulfite Padlock Probe
  misc_feature 96, 97, 98, 99, 100, 101: n = A,T,C or G
gactggaagagcactgttaatttaaaaatctaaacttcccccgaaacgttggaggctcatcgttcctattcaggcagatgttatcgaggtccgacnnnnnnacccgaactccgaaacgaaaaactcgatcggatacgcatgaggct

SEQ ID NO: 2188 - DNA, 146 bp, Artificial Sequence
  Bisulfite Padlock Probe
  misc_feature 92, 93, 94, 95, 96, 97: n = A,T,C or G
gactggaagagcactgttaatttaaaccctcctacaaaacatcgttggaggctcatcgttcctattcaggcagatgttatcgaggtccgacnnnnnnaccaacaaaacaacaactttaccaaaaacgatcggatacgcatgaggct

SEQ ID NO: 2189 - DNA, 146 bp, Artificial Sequence
  Bisulfite Padlock Probe
  misc_feature 92, 93, 94, 95, 96, 97: n = A,T,C or G
gactggaagagcactgttaatttaaaccctcctacaaaacgtcgttggaggctcatcgttcctattcaggcagatgttatcgaggtccgacnnnnnnaccaacgaaacaacaactttaccaaaaacgatcggatacgcatgaggct

SEQ ID NO: 2190 - DNA, 146 bp, Artificial Sequence
  Bisulfite Padlock Probe
  misc_feature 96, 97, 98, 99, 100, 101: n = A,T,C or G
gactggaagagcactgttaatttaatcgaaactcttcccaacccaacgttggaggctcatcgttcctattcaggcagatgttatcgaggtccgacnnnnnncctcgaacacaccaaaaaccaaaaagatcggatacgcatgaggct

SEQ ID NO: 2191 - DNA, 146 bp, Artificial Sequence
  Bisulfite Padlock Probe
  misc_feature 96, 97, 98, 99, 100, 101: n = A,T,C or G
gactggaagagcactgttaatttaatcgaaactcttcccaacccgacgttggaggctcatcgttcctattcaggcagatgttatcgaggtccgacnnnnnncctcgaacgcaccaaaaaccaaaaagatcggatacgcatgaggct

SEQ ID NO: 2192 - DNA, 146 bp, Artificial Sequence
  Bisulfite Padlock Probe
  misc_feature 92, 93, 94, 95, 96, 97: n = A,T,C or G
gactggaagagcactgttaatttatctattcatcttttacatcgttggaggctcatcgttcctattcaggcagatgttatcgaggtccgacnnnnnnaaaactcgaccgacattcaaatataaaccgatcggatacgcatgaggct

SEQ ID NO: 2193 - DNA, 146 bp, Artificial Sequence
  Bisulfite Padlock Probe
  misc_feature 92, 93, 94, 95, 96, 97: n = A,T,C or G
gactggaagagcactgttaatttatctattcgtcttttacatcgttggaggctcatcgttcctattcaggcagatgttatcgaggtccgacnnnnnnaaaactcgaccgacattcgaatataaaccgatcggatacgcatgaggct

SEQ ID NO: 2194 - DNA, 146 bp, Artificial Sequence
  Bisulfite Padlock Probe
  misc_feature 94, 95, 96, 97, 98, 99: n = A,T,C or G
gactggaagagcactgttaatttatctcctcccatctactccctcgttggaggctcatcgttcctattcaggcagatgttatcgaggtccgacnnnnnnaactcaaatccaaaaactacaactatagatcggatacgcatgaggct

SEQ ID NO: 2195 - DNA, 146 bp, Artificial Sequence
  Bisulfite Padlock Probe
  misc_feature 94, 95, 96, 97, 98, 99: n = A,T,C or G
gactggaagagcactgttaatttatctcctcccatctactccctcgttggaggctcatcgttcctattcaggcagatgttatcgaggtccgacnnnnnnaactcgaatccaaaaactacaactatagatcggatacgcatgaggct

SEQ ID NO: 2196 - DNA, 146 bp, Artificial Sequence
  Bisulfite Padlock Probe
  misc_feature 95, 96, 97, 98, 99, 100: n = A,T,C or G
gactggaagagcactgttaatttattaacccaactaaatctcactcgttggaggctcatcgttcctattcaggcagatgttatcgaggtccgacnnnnnnaaaaactaaaatcctaaaacccaacagatcggatacgcatgaggct

SEQ ID NO: 2197 - DNA, 146 bp, Artificial Sequence
  Bisulfite Padlock Probe
  misc_feature 95, 96, 97, 98, 99, 100: n = A,T,C or G
gactggaagagcactgttaatttattaacccgactaaatctcactcgttggaggctcatcgttcctattcaggcagatgttatcgaggtccgacnnnnnnaaaaactaaaatcctaaaacccaacagatcggatacgcatgaggct

SEQ ID NO: 2198 - DNA, 146 bp, Artificial Sequence
  Bisulfite Padlock Probe
  misc_feature 92, 93, 94, 95, 96, 97: n = A,T,C or G
gactggaagagcactgttaatttcatccttttccttcctccacgttggaggctcatcgttcctattcaggcagatgttatcgaggtccgacnnnnnnaaaactcaaaactaacccaaataaaccccgatcggatacgcatgaggct

SEQ ID NO: 2199 - DNA, 146 bp, Artificial Sequence
  Bisulfite Padlock Probe
  misc_feature 93, 94, 95, 96, 97, 98: n = A,T,C or G
gactggaagagcactgttaatttcttaaatccaccaatctcctagttggaggctcatcgttcctattcaggcagatgttatcgaggtccgacnnnnnnaataacaccacctccaaactactatctcgatcggatacgcatgaggct

SEQ ID NO: 2200 - DNA, 146 bp, Artificial Sequence
  Bisulfite Padlock Probe
  misc_feature 93, 94, 95, 96, 97, 98: n = A,T,C or G
gactggaagagcactgttaatttcttaaatccgccaatctcctagttggaggctcatcgttcctattcaggcagatgttatcgaggtccgacnnnnnnaataacaccacctccgaactactatctcgatcggatacgcatgaggct

SEQ ID NO: 2201 - DNA, 146 bp, Artificial Sequence
  Bisulfite Padlock Probe
  misc_feature 92, 93, 94, 95, 96, 97: n = A,T,C or G
gactggaagagcactgttaattttacgaaccccgaaaacaatagttggaggctcatcgttcctattcaggcagatgttatcgaggtccgacnnnnnnaccttaaatccaataaacacctaacccttgatcggatacgcatgaggct

SEQ ID NO: 2202 - DNA, 146 bp, Artificial Sequence
  Bisulfite Padlock Probe
  misc_feature 92, 93, 94, 95, 96, 97: n = A,T,C or G
gactggaagagcactgttaattttacgaaccccgaaaacgatagttggaggctcatcgttcctattcaggcagatgttatcgaggtccgacnnnnnnaccttaaatccaataaacgcctaacccttgatcggatacgcatgaggct

SEQ ID NO: 2203 - DNA, 146 bp, Artificial Sequence
  Bisulfite Padlock Probe
  misc_feature 92, 93, 94, 95, 96, 97: n = A,T,C or G
gactggaagagcactgttaattttataaacaacaacaatttccgttggaggctcatcgttcctattcaggcagatgttatcgaggtccgacnnnnnnactattaatcccaatcaaatcctccacaagatcggatacgcatgaggct

SEQ ID NO: 2204 - DNA, 146 bp, Artificial Sequence
  Bisulfite Padlock Probe
  misc_feature 92, 93, 94, 95, 96, 97: n = A,T,C or G
gactggaagagcactgttaattttataaacaacgacaatttccgttggaggctcatcgttcctattcaggcagatgttatcgaggtccgacnnnnnnactattaatcccaatcaaatcctccacaagatcggatacgcatgaggct

SEQ ID NO: 2205 - DNA, 146 bp, Artificial Sequence
  Bisulfite Padlock Probe
  misc_feature 95, 96, 97, 98, 99, 100: n = A,T,C or G
gactggaagagcactgttacaaaaaccccaaacctatatacaaatcgttggaggctcatcgttcctattcaggcagatgttatcgaggtccgacnnnnnnactaacactacacttctaccaaaaccgatcggatacgcatgaggct

SEQ ID NO: 2206 - DNA, 146 bp, Artificial Sequence
  Bisulfite Padlock Probe
  misc_feature 95, 96, 97, 98, 99, 100: n = A,T,C or G
gactggaagagcactgttacaaaaaccccaaacctatatacaaatcgttggaggctcatcgttcctattcaggcagatgttatcgaggtccgacnnnnnnactaacactacgcttctaccaaaaccgatcggatacgcatgaggct

SEQ ID NO: 2207 - DNA, 146 bp, Artificial Sequence
  Bisulfite Padlock Probe
  misc_feature 92, 93, 94, 95, 96, 97: n = A,T,C or G
gactggaagagcactgttacaaaaactccaactaaacaaaaaagttggaggctcatcgttcctattcaggcagatgttatcgaggtccgacnnnnnnaaaaatccaaaatctaataactacctaaagatcggatacgcatgaggct

SEQ ID NO: 2208 - DNA, 146 bp, Artificial Sequence
  Bisulfite Padlock Probe
  misc_feature 92, 93, 94, 95, 96, 97: n = A,T,C or G
gactggaagagcactgttacaaaaactccaactaaacgaaaaagttggaggctcatcgttcctattcaggcagatgttatcgaggtccgacnnnnnnaaaaatccaaaatctaataactacctaaagatcggatacgcatgaggct

SEQ ID NO: 2209 - DNA, 146 bp, Artificial Sequence
  Bisulfite Padlock Probe
  misc_feature 94, 95, 96, 97, 98, 99: n = A,T,C or G
gactggaagagcactgttacaaaaataaccttaacaacaaaatacgttggaggctcatcgttcctattcaggcagatgttatcgaggtccgacnnnnnnccaaaaacaaatacccaacctaactcagatcggatacgcatgaggct

SEQ ID NO: 2210 - DNA, 146 bp, Artificial Sequence
  Bisulfite Padlock Probe
  misc_feature 94, 95, 96, 97, 98, 99: n = A,T,C or G
gactggaagagcactgttacaaaaataaccttaacaacgaaatacgttggaggctcatcgttcctattcaggcagatgttatcgaggtccgacnnnnnnccaaaaacaaatacccgacctaactcagatcggatacgcatgaggct

SEQ ID NO: 2211 - DNA, 146 bp, Artificial Sequence
  Bisulfite Padlock Probe
  misc_feature 93, 94, 95, 96, 97, 98: n = A,T,C or G
gactggaagagcactgttacaaaaataactctaccatattctccgttggaggctcatcgttcctattcaggcagatgttatcgaggtccgacnnnnnnaaaaatcccttctccataacaatcacccgatcggatacgcatgaggct

SEQ ID NO: 2212 - DNA, 146 bp, Artificial Sequence
  Bisulfite Padlock Probe
  misc_feature 95, 96, 97, 98, 99, 100: n = A,T,C or G
gactggaagagcactgttacaaaacaaaacaaaactaaaccccaacgttggaggctcatcgttcctattcaggcagatgttatcgaggtccgacnnnnnnatctaaaccacaaaactactaaacccgatcggatacgcatgaggct

SEQ ID NO: 2213 - DNA, 146 bp, Artificial Sequence
  Bisulfite Padlock Probe
  misc_feature 92, 93, 94, 95, 96, 97: n = A,T,C or G
gactggaagagcactgttacaaaaccacacaaaaccccaaaaagttggaggctcatcgttcctattcaggcagatgttatcgaggtccgacnnnnnnaaaccccgaaataacaaaaccctctaaacgatcggatacgcatgaggct

SEQ ID NO: 2214 - DNA, 146 bp, Artificial Sequence
  Bisulfite Padlock Probe
  misc_feature 92, 93, 94, 95, 96, 97: n = A,T,C or G
gactggaagagcactgttacaaaaccacgcaaaaccccaaaaagttggaggctcatcgttcctattcaggcagatgttatcgaggtccgacnnnnnnaaaccccgaaataacgaaaccctctaaacgatcggatacgcatgaggct

SEQ ID NO: 2215 - DNA, 146 bp, Artificial Sequence
  Bisulfite Padlock Probe
  misc_feature 92, 93, 94, 95, 96, 97: n = A,T,C or G
gactggaagagcactgttacaaaacgaccaaccaaaccaccaagttggaggctcatcgttcctattcaggcagatgttatcgaggtccgacnnnnnnaaccgtaccaacgtcacactataacaaccgatcggatacgcatgaggct

SEQ ID NO: 2216 - DNA, 146 bp, Artificial Sequence
  Bisulfite Padlock Probe
  misc_feature 92, 93, 94, 95, 96, 97: n = A,T,C or G
gactggaagagcactgttacaaaacgaccaaccaaaccgccaagttggaggctcatcgttcctattcaggcagatgttatcgaggtccgacnnnnnnaaccgtaccaacgtcacgctataacaaccgatcggatacgcatgaggct

SEQ ID NO: 2217 - DNA, 146 bp, Artificial Sequence
  Bisulfite Padlock Probe
  misc_feature 93, 94, 95, 96, 97, 98: n = A,T,C or G
gactggaagagcactgttacaaaactaaaaaccacaaataaaaagttggaggctcatcgttcctattcaggcagatgttatcgaggtccgacnnnnnncacctacttaaaaatcactaatatatacgatcggatacgcatgaggct

SEQ ID NO: 2218 - DNA, 146 bp, Artificial Sequence
  Bisulfite Padlock Probe
  misc_feature 93, 94, 95, 96, 97, 98: n = A,T,C or G
gactggaagagcactgttacaaaactaaaaaccacaaataaaaagttggaggctcatcgttcctattcaggcagatgttatcgaggtccgacnnnnnncacctacttaaaaatcgctaatatatacgatcggatacgcatgaggct

SEQ ID NO: 2219 - DNA, 146 bp, Artificial Sequence
  Bisulfite Padlock Probe
  misc_feature 92, 93, 94, 95, 96, 97: n = A,T,C or G
gactggaagagcactgttacaaaactccgacccgacacctttagttggaggctcatcgttcctattcaggcagatgttatcgaggtccgacnnnnnnatacgactataacgaaacccgaatacaacgatcggatacgcatgaggct

SEQ ID NO: 2220 - DNA, 146 bp, Artificial Sequence
  Bisulfite Padlock Probe
  misc_feature 92, 93, 94, 95, 96, 97: n = A,T,C or G
gactggaagagcactgttacaaaactccgacccgacgcctttagttggaggctcatcgttcctattcaggcagatgttatcgaggtccgacnnnnnnatacgactataacgaaacccgaatacgacgatcggatacgcatgaggct

SEQ ID NO: 2221 - DNA, 146 bp, Artificial Sequence
  Bisulfite Padlock Probe
  misc_feature 93, 94, 95, 96, 97, 98: n = A,T,C or G
gactggaagagcactgttacaaaataaataatcccaaataaaatgttggaggctcatcgttcctattcaggcagatgttatcgaggtccgacnnnnnnaaatcacctataactaaatcaacctaccgatcggatacgcatgaggct

SEQ ID NO: 2222 - DNA, 146 bp, Artificial Sequence
  Bisulfite Padlock Probe
  misc_feature 94, 95, 96, 97, 98, 99: n = A,T,C or G
gactggaagagcactgttacaaaatatattaatttcttattaaacgttggaggctcatcgttcctattcaggcagatgttatcgaggtccgacnnnnnntaataacttaaaaatcacaaataatatgatcggatacgcatgaggct

SEQ ID NO: 2223 - DNA, 146 bp, Artificial Sequence
  Bisulfite Padlock Probe
  misc_feature 93, 94, 95, 96, 97, 98: n = A,T,C or G
gactggaagagcactgttacaaaatcaaaccaaaccctactcccgttggaggctcatcgttcctattcaggcagatgttatcgaggtccgacnnnnnnccacaaaaccctctcccaacccaatctagatcggatacgcatgaggct

SEQ ID NO: 2224 - DNA, 146 bp, Artificial Sequence
  Bisulfite Padlock Probe
  misc_feature 93, 94, 95, 96, 97, 98: n = A,T,C or G
gactggaagagcactgttacaaaatcaccaaatcgacacaaaaagttggaggctcatcgttcctattcaggcagatgttatcgaggtccgacnnnnnnacgctaaacgtattccaaaaacattcccgatcggatacgcatgaggct

SEQ ID NO: 2225 - DNA, 146 bp, Artificial Sequence
  Bisulfite Padlock Probe
  misc_feature 93, 94, 95, 96, 97, 98: n = A,T,C or G
gactggaagagcactgttacaaaatcaccaaatcgacgcaaaaagttggaggctcatcgttcctattcaggcagatgttatcgaggtccgacnnnnnnacgctaaacgtattccgaaaacattcccgatcggatacgcatgaggct

SEQ ID NO: 2226 - DNA, 146 bp, Artificial Sequence
  Bisulfite Padlock Probe
  misc_feature 93, 94, 95, 96, 97, 98: n = A,T,C or G
gactggaagagcactgttacaaaattctaaatttctcaaaactagttggaggctcatcgttcctattcaggcagatgttatcgaggtccgacnnnnnnctatcctccactaatcccaaatttaaccgatcggatacgcatgaggct

SEQ ID NO: 2227 - DNA, 146 bp, Artificial Sequence
  Bisulfite Padlock Probe
  misc_feature 95, 96, 97, 98, 99, 100: n = A,T,C or G
gactggaagagcactgttacaaacacaaattccctcactaaactacgttggaggctcatcgttcctattcaggcagatgttatcgaggtccgacnnnnnnaaaaacccctacaaaaatacaaaaccgatcggatacgcatgaggct

SEQ ID NO: 2228 - DNA, 146 bp, Artificial Sequence
  Bisulfite Padlock Probe
  misc_feature 94, 95, 96, 97, 98, 99: n = A,T,C or G
gactggaagagcactgttacaaacaccctcatcctccaactacacgttggaggctcatcgttcctattcaggcagatgttatcgaggtccgacnnnnnnataaaactaacgctaaaaaccaccaccgatcggatacgcatgaggct

SEQ ID NO: 2229 - DNA, 146 bp, Artificial Sequence
  Bisulfite Padlock Probe
  misc_feature 93, 94, 95, 96, 97, 98: n = A,T,C or G
gactggaagagcactgttacaaacacgaaacccgcactctaaaagttggaggctcatcgttcctattcaggcagatgttatcgaggtccgacnnnnnncctaaaactaataccaaacaaaaaccccgatcggatacgcatgaggct

SEQ ID NO: 2230 - DNA, 146 bp, Artificial Sequence
  Bisulfite Padlock Probe
  misc_feature 93, 94, 95, 96, 97, 98: n = A,T,C or G
gactggaagagcactgttacaaacacgaaacccgcgctctaaaagttggaggctcatcgttcctattcaggcagatgttatcgaggtccgacnnnnnncctaaaactaataccaaacaaaaaccccgatcggatacgcatgaggct

SEQ ID NO: 2231 - DNA, 146 bp, Artificial Sequence
  Bisulfite Padlock Probe
  misc_feature 93, 94, 95, 96, 97, 98: n = A,T,C or G
gactggaagagcactgttacaaaccgtaccaaacaaatacccccgttggaggctcatcgttcctattcaggcagatgttatcgaggtccgacnnnnnncaaatcaaaatctaattccaaaaccaccgatcggatacgcatgaggct

SEQ ID NO: 2232 - DNA, 146 bp, Artificial Sequence
  Bisulfite Padlock Probe
  misc_feature 93, 94, 95, 96, 97, 98: n = A,T,C or G
gactggaagagcactgttacaaaccgtaccaaacgaatacccccgttggaggctcatcgttcctattcaggcagatgttatcgaggtccgacnnnnnncaaatcaaaatctaattccaaaaccaccgatcggatacgcatgaggct

SEQ ID NO: 2233 - DNA, 146 bp, Artificial Sequence
  Bisulfite Padlock Probe
  misc_feature 92, 93, 94, 95, 96, 97: n = A,T,C or G
gactggaagagcactgttacaaaccgtccgcgtcctacataaagttggaggctcatcgttcctattcaggcagatgttatcgaggtccgacnnnnnncgcaactaaacgcgctacatatcatactagatcggatacgcatgaggct

SEQ ID NO: 2234 - DNA, 146 bp, Artificial Sequence
  Bisulfite Padlock Probe
  misc_feature 92, 93, 94, 95, 96, 97: n = A,T,C or G
gactggaagagcactgttacaaaccgtccgcgtcctacgtaaagttggaggctcatcgttcctattcaggcagatgttatcgaggtccgacnnnnnncgcaactaaacgcgctacgtatcatactagatcggatacgcatgaggct

SEQ ID NO: 2235 - DNA, 146 bp, Artificial Sequence
  Bisulfite Padlock Probe
  misc_feature 93, 94, 95, 96, 97, 98: n = A,T,C or G
gactggaagagcactgttacaaataataactaaacacctaccaagttggaggctcatcgttcctattcaggcagatgttatcgaggtccgacnnnnnnaaccttctacacctaccaatctctcctcgatcggatacgcatgaggct

SEQ ID NO: 2236 - DNA, 146 bp, Artificial Sequence
  Bisulfite Padlock Probe
  misc_feature 94, 95, 96, 97, 98, 99: n = A,T,C or G
gactggaagagcactgttacaaatacaattaaactaatataaatcgttggaggctcatcgttcctattcaggcagatgttatcgaggtccgacnnnnnnaaactaaacaactacaatcacccaaacgatcggatacgcatgaggct

SEQ ID NO: 2237 - DNA, 146 bp, Artificial Sequence
  Bisulfite Padlock Probe
  misc_feature 94, 95, 96, 97, 98, 99: n = A,T,C or G
gactggaagagcactgttacaaatacaattaaactaatataaatcgttggaggctcatcgttcctattcaggcagatgttatcgaggtccgacnnnnnnaaactaaacaactacaatcacccgaacgatcggatacgcatgaggct

SEQ ID NO: 2238 - DNA, 146 bp, Artificial Sequence
  Bisulfite Padlock Probe
  misc_feature 93, 94, 95, 96, 97, 98: n = A,T,C or G
gactggaagagcactgttacaaatatacaaacaaatatacttcagttggaggctcatcgttcctattcaggcagatgttatcgaggtccgacnnnnnnaatttcaaaaattaccctccaacaactagatcggatacgcatgaggct

SEQ ID NO: 2239 - DNA, 146 bp, Artificial Sequence
  Bisulfite Padlock Probe
  misc_feature 93, 94, 95, 96, 97, 98: n = A,T,C or G
gactggaagagcactgttacaaatatacgaacaaatatacttcagttggaggctcatcgttcctattcaggcagatgttatcgaggtccgacnnnnnnaatttcaaaaattaccctccaacaactagatcggatacgcatgaggct

SEQ ID NO: 2240 - DNA, 146 bp, Artificial Sequence
  Bisulfite Padlock Probe
  misc_feature 95, 96, 97, 98, 99, 100: n = A,T,C or G
gactggaagagcactgttacaaatcacaaatttccaattccaaaccgttggaggctcatcgttcctattcaggcagatgttatcgaggtccgacnnnnnnccgaaactacctccaacctcaaatccgatcggatacgcatgaggct

SEQ ID NO: 2241 - DNA, 146 bp, Artificial Sequence
  Bisulfite Padlock Probe
  misc_feature 92, 93, 94, 95, 96, 97: n = A,T,C or G
gactggaagagcactgttacaaatcacaccctccacctctaaagttggaggctcatcgttcctattcaggcagatgttatcgaggtccgacnnnnnnaacttcacaccaaacaaaaccaaccacaagatcggatacgcatgaggct

SEQ ID NO: 2242 - DNA, 146 bp, Artificial Sequence
  Bisulfite Padlock Probe
  misc_feature 95, 96, 97, 98, 99, 100: n = A,T,C or G
gactggaagagcactgttacaaatcacgaatttccaattccaaaccgttggaggctcatcgttcctattcaggcagatgttatcgaggtccgacnnnnnnccgaaactacctccaacctcgaatccgatcggatacgcatgaggct

SEQ ID NO: 2243 - DNA, 146 bp, Artificial Sequence
  Bisulfite Padlock Probe
  misc_feature 93, 94, 95, 96, 97, 98: n = A,T,C or G
gactggaagagcactgttacaaatcatataacaaaaacaacaacgttggaggctcatcgttcctattcaggcagatgttatcgaggtccgacnnnnnnttttcacctctttcctatctcccatatcgatcggatacgcatgaggct

SEQ ID NO: 2244 - DNA, 146 bp, Artificial Sequence
  Bisulfite Padlock Probe
  misc_feature 95, 96, 97, 98, 99, 100: n = A,T,C or G
gactggaagagcactgttacaaatcccgaacgacaactaataaaaagttggaggctcatcgttcctattcaggcagatgttatcgaggtccgacnnnnnnaaaccgctacccaacccataaaactcgatcggatacgcatgaggct

SEQ ID NO: 2245 - DNA, 146 bp, Artificial Sequence
  Bisulfite Padlock Probe
  misc_feature 95, 96, 97, 98, 99, 100: n = A,T,C or G
gactggaagagcactgttacaaatcccgaacgacgactaataaaaagttggaggctcatcgttcctattcaggcagatgttatcgaggtccgacnnnnnnaaaccgctacccaacccgtaaaactcgatcggatacgcatgaggct

SEQ ID NO: 2246 - DNA, 146 bp, Artificial Sequence
  Bisulfite Padlock Probe
  misc_feature 96, 97, 98, 99, 100, 101: n = A,T,C or G
gactggaagagcactgttacaaatccgaaacgaaactcaaaacaaccgttggaggctcatcgttcctattcaggcagatgttatcgaggtccgacnnnnnnaaaccaaaaaatcaataactacaacgatcggatacgcatgaggct

SEQ ID NO: 2247 - DNA, 146 bp, Artificial Sequence
  Bisulfite Padlock Probe
  misc_feature 96, 97, 98, 99, 100, 101: n = A,T,C or G
gactggaagagcactgttacaaatccgaaacgaaactcgaaacaaccgttggaggctcatcgttcctattcaggcagatgttatcgaggtccgacnnnnnnaaaccgaaaaatcaataactacaacgatcggatacgcatgaggct

SEQ ID NO: 2248 - DNA, 146 bp, Artificial Sequence
  Bisulfite Padlock Probe
  misc_feature 92, 93, 94, 95, 96, 97: n = A,T,C or G
gactggaagagcactgttacaaatttccaattttacactacctgttggaggctcatcgttcctattcaggcagatgttatcgaggtccgacnnnnnntctaaatcccaaaaactacacataacaccgatcggatacgcatgaggct

SEQ ID NO: 2249 - DNA, 146 bp, Artificial Sequence
  Bisulfite Padlock Probe
  misc_feature 92, 93, 94, 95, 96, 97: n = A,T,C or G
gactggaagagcactgttacaaatttccgattttacactacctgttggaggctcatcgttcctattcaggcagatgttatcgaggtccgacnnnnnntctaaatcccaaaaactacgcataacaccgatcggatacgcatgaggct

SEQ ID NO: 2250 - DNA, 146 bp, Artificial Sequence
  Bisulfite Padlock Probe
  misc_feature 93, 94, 95, 96, 97, 98: n = A,T,C or G
gactggaagagcactgttacaacaaaaactcaataaacctaaccgttggaggctcatcgttcctattcaggcagatgttatcgaggtccgacnnnnnnaaacataaatccctactctctacaaaacgatcggatacgcatgaggct

SEQ ID NO: 2251 - DNA, 146 bp, Artificial Sequence
  Bisulfite Padlock Probe
  misc_feature 93, 94, 95, 96, 97, 98: n = A,T,C or G
gactggaagagcactgttacaacaaaaactcgataaacctaaccgttggaggctcatcgttcctattcaggcagatgttatcgaggtccgacnnnnnnaaacataaatccctactctctacgaaacgatcggatacgcatgaggct

SEQ ID NO: 2252 - DNA, 146 bp, Artificial Sequence
  Bisulfite Padlock Probe
  misc_feature 92, 93, 94, 95, 96, 97: n = A,T,C or G
gactggaagagcactgttacaacaaaaccctacaaaacgccacgttggaggctcatcgttcctattcaggcagatgttatcgaggtccgacnnnnnnaactaaaaccgcctacaaaactacaaacagatcggatacgcatgaggct

SEQ ID NO: 2253 - DNA, 146 bp, Artificial Sequence
  Bisulfite Padlock Probe
  misc_feature 92, 93, 94, 95, 96, 97: n = A,T,C or G
gactggaagagcactgttacaacaaaaccctacaaaacgccgcgttggaggctcatcgttcctattcaggcagatgttatcgaggtccgacnnnnnnaactaaaaccgcctacaaaactacgaacagatcggatacgcatgaggct

SEQ ID NO: 2254 - DNA, 146 bp, Artificial Sequence
  Bisulfite Padlock Probe
  misc_feature 92, 93, 94, 95, 96, 97: n = A,T,C or G
gactggaagagcactgttacaacaaacaactcaaaacctaaccgttggaggctcatcgttcctattcaggcagatgttatcgaggtccgacnnnnnnttctcaatcccataatacctcaaactaaagatcggatacgcatgaggct

SEQ ID NO: 2255 - DNA, 146 bp, Artificial Sequence
  Bisulfite Padlock Probe
  misc_feature 92, 93, 94, 95, 96, 97: n = A,T,C or G
gactggaagagcactgttacaacaaaccaaaaccctacaacatgttggaggctcatcgttcctattcaggcagatgttatcgaggtccgacnnnnnnacctactccaacacctccttcataatctcgatcggatacgcatgaggct

SEQ ID NO: 2256 - DNA, 146 bp, Artificial Sequence
  Bisulfite Padlock Probe
  misc_feature 92, 93, 94, 95, 96, 97: n = A,T,C or G
gactggaagagcactgttacaacaaactacatccccctcccccgttggaggctcatcgttcctattcaggcagatgttatcgaggtccgacnnnnnnaaaataccgaaaccctaaactccaaaaatgatcggatacgcatgaggct

SEQ ID NO: 2257 - DNA, 146 bp, Artificial Sequence
  Bisulfite Padlock Probe
  misc_feature 92, 93, 94, 95, 96, 97: n = A,T,C or G
gactggaagagcactgttacaacaaactacatccccctcccccgttggaggctcatcgttcctattcaggcagatgttatcgaggtccgacnnnnnnaaaataccgaaaccctaaactccgaaaatgatcggatacgcatgaggct

SEQ ID NO: 2258 - DNA, 146 bp, Artificial Sequence
  Bisulfite Padlock Probe
  misc_feature 94, 95, 96, 97, 98, 99: n = A,T,C or G
gactggaagagcactgttacaacaaatcccaaccacccacaatacgttggaggctcatcgttcctattcaggcagatgttatcgaggtccgacnnnnnnaaaaataatacgcttcaccgccaatccgatcggatacgcatgaggct

SEQ ID NO: 2259 - DNA, 146 bp, Artificial Sequence
  Bisulfite Padlock Probe
  misc_feature 94, 95, 96, 97, 98, 99: n = A,T,C or G
gactggaagagcactgttacaacaaatcccaaccacccacgatacgttggaggctcatcgttcctattcaggcagatgttatcgaggtccgacnnnnnnaaaaataatacgcttcaccgccgatccgatcggatacgcatgaggct

SEQ ID NO: 2260 - DNA, 146 bp, Artificial Sequence
  Bisulfite Padlock Probe
  misc_feature 96, 97, 98, 99, 100, 101: n = A,T,C or G
gactggaagagcactgttacaacaaccaactctatatcatccaaaaagttggaggctcatcgttcctattcaggcagatgttatcgaggtccgacnnnnnncaataatctaactaaccatctaaacgatcggatacgcatgaggct

SEQ ID NO: 2261 - DNA, 146 bp, Artificial Sequence
  Bisulfite Padlock Probe
  misc_feature 92, 93, 94, 95, 96, 97: n = A,T,C or G
gactggaagagcactgttacaacaaccctccctcacccaaaacgttggaggctcatcgttcctattcaggcagatgttatcgaggtccgacnnnnnnaaaaatactatatacacaataaaataaaagatcggatacgcatgaggct

SEQ ID NO: 2262 - DNA, 146 bp, Artificial Sequence
  Bisulfite Padlock Probe
  misc_feature 92, 93, 94, 95, 96, 97: n = A,T,C or G
gactggaagagcactgttacaacaaccctccctcacccgaaacgttggaggctcatcgttcctattcaggcagatgttatcgaggtccgacnnnnnnaaaaatactatatacacaataaaataaaagatcggatacgcatgaggct

SEQ ID NO: 2263 - DNA, 146 bp, Artificial Sequence
  Bisulfite Padlock Probe
  misc_feature 95, 96, 97, 98, 99, 100: n = A,T,C or G
gactggaagagcactgttacaacaacttcctcaactcgacaaaaacgttggaggctcatcgttcctattcaggcagatgttatcgaggtccgacnnnnnntctaaaacccgatacaccgaccatttgatcggatacgcatgaggct

SEQ ID NO: 2264 - DNA, 146 bp, Artificial Sequence
  Bisulfite Padlock Probe
  misc_feature 95, 96, 97, 98, 99, 100: n = A,T,C or G
gactggaagagcactgttacaacaacttcctcaactcgacgaaaacgttggaggctcatcgttcctattcaggcagatgttatcgaggtccgacnnnnnntctaaaacccgatacaccgaccgtttgatcggatacgcatgaggct

SEQ ID NO: 2265 - DNA, 146 bp, Artificial Sequence
  Bisulfite Padlock Probe
  misc_feature 95, 96, 97, 98, 99, 100: n = A,T,C or G
gactggaagagcactgttacaacaattctctaccccctcccaaaacgttggaggctcatcgttcctattcaggcagatgttatcgaggtccgacnnnnnnccgacaaactcaccaacactcacaacgatcggatacgcatgaggct

SEQ ID NO: 2266 - DNA, 146 bp, Artificial Sequence
  Bisulfite Padlock Probe
  misc_feature 95, 96, 97, 98, 99, 100: n = A,T,C or G
gactggaagagcactgttacaacaattctctaccccctcccaaaacgttggaggctcatcgttcctattcaggcagatgttatcgaggtccgacnnnnnnccgacaaactcaccaacgctcacaacgatcggatacgcatgaggct

SEQ ID NO: 2267 - DNA, 146 bp, Artificial Sequence
  Bisulfite Padlock Probe
  misc_feature 96, 97, 98, 99, 100, 101: n = A,T,C or G
gactggaagagcactgttacaacacaaacccataaaacaaccaaaccgttggaggctcatcgttcctattcaggcagatgttatcgaggtccgacnnnnnnaaccaaaacgcccttaccaacactcgatcggatacgcatgaggct

SEQ ID NO: 2268 - DNA, 146 bp, Artificial Sequence
  Bisulfite Padlock Probe
  misc_feature 93, 94, 95, 96, 97, 98: n = A,T,C or G
gactggaagagcactgttacaacaccaactcctccctaaaacccgttggaggctcatcgttcctattcaggcagatgttatcgaggtccgacnnnnnntcccacttctactactacaataccaacagatcggatacgcatgaggct

SEQ ID NO: 2269 - DNA, 146 bp, Artificial Sequence
  Bisulfite Padlock Probe
  misc_feature 93, 94, 95, 96, 97, 98: n = A,T,C or G
gactggaagagcactgttacaacaccaactcctccctaaaacccgttggaggctcatcgttcctattcaggcagatgttatcgaggtccgacnnnnnntcccgcttctactactacaataccaacagatcggatacgcatgaggct

SEQ ID NO: 2270 - DNA, 146 bp, Artificial Sequence
  Bisulfite Padlock Probe
  misc_feature 95, 96, 97, 98, 99, 100: n = A,T,C or G
gactggaagagcactgttacaacactctccaactaataaactataagttggaggctcatcgttcctattcaggcagatgttatcgaggtccgacnnnnnncccaacccgaaacgaaacaactcaacgatcggatacgcatgaggct

SEQ ID NO: 2271 - DNA, 146 bp, Artificial Sequence
  Bisulfite Padlock Probe
  misc_feature 93, 94, 95, 96, 97, 98: n = A,T,C or G
gactggaagagcactgttacaaccaataacaaccaaacaactccgttggaggctcatcgttcctattcaggcagatgttatcgaggtccgacnnnnnntcctataaatcccctcctcctcctatccgatcggatacgcatgaggct

SEQ ID NO: 2272 - DNA, 146 bp, Artificial Sequence
  Bisulfite Padlock Probe
  misc_feature 93, 94, 95, 96, 97, 98: n = A,T,C or G
gactggaagagcactgttacaaccaataacaaccgaacaactccgttggaggctcatcgttcctattcaggcagatgttatcgaggtccgacnnnnnntcctataaatcccctcctcctcctatccgatcggatacgcatgaggct

SEQ ID NO: 2273 - DNA, 146 bp, Artificial Sequence
  Bisulfite Padlock Probe
  misc_feature 95, 96, 97, 98, 99, 100: n = A,T,C or G
gactggaagagcactgttacaaccacaacctcaatctccccatctagttggaggctcatcgttcctattcaggcagatgttatcgaggtccgacnnnnnnaaaacgaacccttccatcccctctacgatcggatacgcatgaggct

SEQ ID NO: 2274 - DNA, 146 bp, Artificial Sequence
  Bisulfite Padlock Probe
  misc_feature 92, 93, 94, 95, 96, 97: n = A,T,C or G
gactggaagagcactgttacaaccacacccacccaaaaatctcgttggaggctcatcgttcctattcaggcagatgttatcgaggtccgacnnnnnntcttcaccccgaaacaacataaaaacctcgatcggatacgcatgaggct

SEQ ID NO: 2275 - DNA, 146 bp, Artificial Sequence
  Bisulfite Padlock Probe
  misc_feature 95, 96, 97, 98, 99, 100: n = A,T,C or G
gactggaagagcactgttacaaccacgacctcaatctccccatctagttggaggctcatcgttcctattcaggcagatgttatcgaggtccgacnnnnnnaaaacgaacccttccgtcccctctacgatcggatacgcatgaggct

SEQ ID NO: 2276 - DNA, 146 bp, Artificial Sequence
  Bisulfite Padlock Probe
  misc_feature 92, 93, 94, 95, 96, 97: n = A,T,C or G
gactggaagagcactgttacaaccactctttcctctaaacctcgttggaggctcatcgttcctattcaggcagatgttatcgaggtccgacnnnnnnccctacccaaaataaacaacccaatcaaagatcggatacgcatgaggct

SEQ ID NO: 2277 - DNA, 146 bp, Artificial Sequence
  Bisulfite Padlock Probe
  misc_feature 92, 93, 94, 95, 96, 97: n = A,T,C or G
gactggaagagcactgttacaaccactctttcctctaaacctcgttggaggctcatcgttcctattcaggcagatgttatcgaggtccgacnnnnnnccctacccgaaataaacaacccaatcaaagatcggatacgcatgaggct

SEQ ID NO: 2278 - DNA, 146 bp, Artificial Sequence
  Bisulfite Padlock Probe
  misc_feature 93, 94, 95, 96, 97, 98: n = A,T,C or G
gactggaagagcactgttacaacccctttcttacttccaaaaccgttggaggctcatcgttcctattcaggcagatgttatcgaggtccgacnnnnnnacataacattcatttatcttcttaattcgatcggatacgcatgaggct

SEQ ID NO: 2279 - DNA, 146 bp, Artificial Sequence
  Bisulfite Padlock Probe
  misc_feature 95, 96, 97, 98, 99, 100: n = A,T,C or G
gactggaagagcactgttacaaccgaaacgtacgaaaaacaaaaaagttggaggctcatcgttcctattcaggcagatgttatcgaggtccgacnnnnnnaccacttacctaacgcaacgaacacagatcggatacgcatgaggct

SEQ ID NO: 2280 - DNA, 146 bp, Artificial Sequence
  Bisulfite Padlock Probe
  misc_feature 95, 96, 97, 98, 99, 100: n = A,T,C or G
gactggaagagcactgttacaaccgaaacgtacgaaaaacgaaaaagttggaggctcatcgttcctattcaggcagatgttatcgaggtccgacnnnnnnaccacttacctaacgcaacgaacgcagatcggatacgcatgaggct

SEQ ID NO: 2281 - DNA, 146 bp, Artificial Sequence
  Bisulfite Padlock Probe
  misc_feature 92, 93, 94, 95, 96, 97: n = A,T,C or G
gactggaagagcactgttacaaccgaaccaactcctacataaagttggaggctcatcgttcctattcaggcagatgttatcgaggtccgacnnnnnnacaataacaattctaaaaacaaacaaccagatcggatacgcatgaggct

SEQ ID NO: 2282 - DNA, 146 bp, Artificial Sequence
  Bisulfite Padlock Probe
  misc_feature 92, 93, 94, 95, 96, 97: n = A,T,C or G
gactggaagagcactgttacaaccgaaccaactcctacgtaaagttggaggctcatcgttcctattcaggcagatgttatcgaggtccgacnnnnnnacaataacaattctaaaaacaaacgaccagatcggatacgcatgaggct

SEQ ID NO: 2283 - DNA, 146 bp, Artificial Sequence
  Bisulfite Padlock Probe
  misc_feature 92, 93, 94, 95, 96, 97: n = A,T,C or G
gactggaagagcactgttacaaccgcaaaccgatacaaaatacgttggaggctcatcgttcctattcaggcagatgttatcgaggtccgacnnnnnnatacaccctcctaccctacaaactatcccgatcggatacgcatgaggct

SEQ ID NO: 2284 - DNA, 146 bp, Artificial Sequence
  Bisulfite Padlock Probe
  misc_feature 92, 93, 94, 95, 96, 97: n = A,T,C or G
gactggaagagcactgttacaaccgcaaaccgatacgaaatacgttggaggctcatcgttcctattcaggcagatgttatcgaggtccgacnnnnnnatacaccctcctaccctacaaactatcccgatcggatacgcatgaggct

SEQ ID NO: 2285 - DNA, 146 bp, Artificial Sequence
  Bisulfite Padlock Probe
  misc_feature 93, 94, 95, 96, 97, 98: n = A,T,C or G
gactggaagagcactgttacaacctaaaaacattcaaaacttccgttggaggctcatcgttcctattcaggcagatgttatcgaggtccgacnnnnnntttccttctcctcgccttcctacaactcgatcggatacgcatgaggct

SEQ ID NO: 2286 - DNA, 146 bp, Artificial Sequence
  Bisulfite Padlock Probe
  misc_feature 93, 94, 95, 96, 97, 98: n = A,T,C or G
gactggaagagcactgttacaacctaaaaacattcgaaacttccgttggaggctcatcgttcctattcaggcagatgttatcgaggtccgacnnnnnntttccttctcctcgccttcctacgactcgatcggatacgcatgaggct

SEQ ID NO: 2287 - DNA, 146 bp, Artificial Sequence
  Bisulfite Padlock Probe
  misc_feature 95, 96, 97, 98, 99, 100: n = A,T,C or G
gactggaagagcactgttacaacctaaccaaaacaactctatccccgttggaggctcatcgttcctattcaggcagatgttatcgaggtccgacnnnnnnaactacgaaatacgcgcaaactactcgatcggatacgcatgaggct

SEQ ID NO: 2288 - DNA, 146 bp, Artificial Sequence
  Bisulfite Padlock Probe
  misc_feature 92, 93, 94, 95, 96, 97: n = A,T,C or G
gactggaagagcactgttacaacctaacccctcatcctaactcgttggaggctcatcgttcctattcaggcagatgttatcgaggtccgacnnnnnnacgtccaaaaacaacgcgaaacattaaccgatcggatacgcatgaggct

SEQ ID NO: 2289 - DNA, 146 bp, Artificial Sequence
  Bisulfite Padlock Probe
  misc_feature 95, 96, 97, 98, 99, 100: n = A,T,C or G
gactggaagagcactgttacaacctaaccgaaacaactctatccccgttggaggctcatcgttcctattcaggcagatgttatcgaggtccgacnnnnnnaactacgaaatacgcgcgaactactcgatcggatacgcatgaggct

SEQ ID NO: 2290 - DNA, 146 bp, Artificial Sequence
  Bisulfite Padlock Probe
  misc_feature 92, 93, 94, 95, 96, 97: n = A,T,C or G
gactggaagagcactgttacaacctcccgcaaacctcttaaccgttggaggctcatcgttcctattcaggcagatgttatcgaggtccgacnnnnnntaaatacaataaaatacaaaacaaaaactgatcggatacgcatgaggct

SEQ ID NO: 2291 - DNA, 146 bp, Artificial Sequence
  Bisulfite Padlock Probe
  misc_feature 92, 93, 94, 95, 96, 97: n = A,T,C or G
gactggaagagcactgttacaacctcccgcgaacctcttaaccgttggaggctcatcgttcctattcaggcagatgttatcgaggtccgacnnnnnntaaatacgataaaatacaaaacaaaaactgatcggatacgcatgaggct

SEQ ID NO: 2292 - DNA, 146 bp, Artificial Sequence
  Bisulfite Padlock Probe
  misc_feature 92, 93, 94, 95, 96, 97: n = A,T,C or G
gactggaagagcactgttacaacgaacaactcaaaacctaaccgttggaggctcatcgttcctattcaggcagatgttatcgaggtccgacnnnnnnttctcaatcccgtaatacctcaaactaaagatcggatacgcatgaggct

SEQ ID NO: 2293 - DNA, 146 bp, Artificial Sequence
  Bisulfite Padlock Probe
  misc_feature 92, 93, 94, 95, 96, 97: n = A,T,C or G
gactggaagagcactgttacaacgaaccaaaaccctacaacatgttggaggctcatcgttcctattcaggcagatgttatcgaggtccgacnnnnnnacctactccaacacctccttcataatctcgatcggatacgcatgaggct

SEQ ID NO: 2294 - DNA, 146 bp, Artificial Sequence
  Bisulfite Padlock Probe
  misc_feature 92, 93, 94, 95, 96, 97: n = A,T,C or G
gactggaagagcactgttacaacgaacgattctactacaaatagttggaggctcatcgttcctattcaggcagatgttatcgaggtccgacnnnnnncaaaacgccgaaaccattaatataaatctgatcggatacgcatgaggct

SEQ ID NO: 2295 - DNA, 146 bp, Artificial Sequence
  Bisulfite Padlock Probe
  misc_feature 92, 93, 94, 95, 96, 97: n = A,T,C or G
gactggaagagcactgttacaacgaacgattctactacgaatagttggaggctcatcgttcctattcaggcagatgttatcgaggtccgacnnnnnncaaaacgccgaaaccgttaatataaatctgatcggatacgcatgaggct

SEQ ID NO: 2296 - DNA, 146 bp, Artificial Sequence
  Bisulfite Padlock Probe
  misc_feature 96, 97, 98, 99, 100, 101: n = A,T,C or G
gactggaagagcactgttacaacgaccaactctatatcatccaaaaagttggaggctcatcgttcctattcaggcagatgttatcgaggtccgacnnnnnncaataatctaactaaccatctaaacgatcggatacgcatgaggct

SEQ ID NO: 2297 - DNA, 146 bp, Artificial Sequence
  Bisulfite Padlock Probe
  misc_feature 93, 94, 95, 96, 97, 98: n = A,T,C or G
gactggaagagcactgttacaacgacgtaaacgacgttaacaacgttggaggctcatcgttcctattcaggcagatgttatcgaggtccgacnnnnnnaaaaacgaacgaacgaactccaacaaacgatcggatacgcatgaggct

SEQ ID NO: 2298 - DNA, 146 bp, Artificial Sequence
  Bisulfite Padlock Probe
  misc_feature 93, 94, 95, 96, 97, 98: n = A,T,C or G
gactggaagagcactgttacaacgacgtaaacgacgttaacgacgttggaggctcatcgttcctattcaggcagatgttatcgaggtccgacnnnnnnaaaaacgaacgaacgaactccgacaaacgatcggatacgcatgaggct

SEQ ID NO: 2299 - DNA, 146 bp, Artificial Sequence
  Bisulfite Padlock Probe
  misc_feature 96, 97, 98, 99, 100, 101: n = A,T,C or G
gactggaagagcactgttacaacgcaaacccataaaacaaccaaaccgttggaggctcatcgttcctattcaggcagatgttatcgaggtccgacnnnnnnaaccaaaacgcccttaccaacgctcgatcggatacgcatgaggct

SEQ ID NO: 2300 - DNA, 146 bp, Artificial Sequence
  Bisulfite Padlock Probe
  misc_feature 93, 94, 95, 96, 97, 98: n = A,T,C or G
gactggaagagcactgttacaacgctaaaacccacatcaaaaacgttggaggctcatcgttcctattcaggcagatgttatcgaggtccgacnnnnnnttaaatctaatcatttatttacataccagatcggatacgcatgaggct

SEQ ID NO: 2301 - DNA, 146 bp, Artificial Sequence
  Bisulfite Padlock Probe
  misc_feature 93, 94, 95, 96, 97, 98: n = A,T,C or G
gactggaagagcactgttacaacgctaaaacccacgtcaaaaacgttggaggctcatcgttcctattcaggcagatgttatcgaggtccgacnnnnnnttaaatctaatcatttatttacataccagatcggatacgcatgaggct

SEQ ID NO: 2302 - DNA, 146 bp, Artificial Sequence
  Bisulfite Padlock Probe
  misc_feature 95, 96, 97, 98, 99, 100: n = A,T,C or G
gactggaagagcactgttacaacgctctccaactaataaactataagttggaggctcatcgttcctattcaggcagatgttatcgaggtccgacnnnnnncccaacccgaaacgaaacaactcgacgatcggatacgcatgaggct

SEQ ID NO: 2303 - DNA, 146 bp, Artificial Sequence
  Bisulfite Padlock Probe
  misc_feature 92, 93, 94, 95, 96, 97: n = A,T,C or G
gactggaagagcactgttacaacgtaccgtacacatccacttcgttggaggctcatcgttcctattcaggcagatgttatcgaggtccgacnnnnnntttttaatttaatttatatcacctacaacgatcggatacgcatgaggct

SEQ ID NO: 2304 - DNA, 146 bp, Artificial Sequence
  Bisulfite Padlock Probe
  misc_feature 92, 93, 94, 95, 96, 97: n = A,T,C or G
gactggaagagcactgttacaacgtaccgtacacgtccacttcgttggaggctcatcgttcctattcaggcagatgttatcgaggtccgacnnnnnntttttaatttaatttatatcgcctacaacgatcggatacgcatgaggct

SEQ ID NO: 2305 - DNA, 146 bp, Artificial Sequence
  Bisulfite Padlock Probe
  misc_feature 92, 93, 94, 95, 96, 97: n = A,T,C or G
gactggaagagcactgttacaactaacttccaacctaacaaacgttggaggctcatcgttcctattcaggcagatgttatcgaggtccgacnnnnnnaaaaataaaaatatctctcccactaaacagatcggatacgcatgaggct

SEQ ID NO: 2306 - DNA, 146 bp, Artificial Sequence
  Bisulfite Padlock Probe
  misc_feature 92, 93, 94, 95, 96, 97: n = A,T,C or G
gactggaagagcactgttacaactaacttccaacctaacgaacgttggaggctcatcgttcctattcaggcagatgttatcgaggtccgacnnnnnnaaaaataaaaatatctctcccgctaaacagatcggatacgcatgaggct

SEQ ID NO: 2307 - DNA, 146 bp, Artificial Sequence
  Bisulfite Padlock Probe
  misc_feature 93, 94, 95, 96, 97, 98: n = A,T,C or G
gactggaagagcactgttacaactaatttcctcttaaaatctaagttggaggctcatcgttcctattcaggcagatgttatcgaggtccgacnnnnnntacctctcctctaaccctaaaaacaaaagatcggatacgcatgaggct

SEQ ID NO: 2308 - DNA, 146 bp, Artificial Sequence
  Bisulfite Padlock Probe
  misc_feature 94, 95, 96, 97, 98, 99: n = A,T,C or G
gactggaagagcactgttacaactaccgaaaacgacaaacatctcgttggaggctcatcgttcctattcaggcagatgttatcgaggtccgacnnnnnncacacccacccacaccaaaataaaaccgatcggatacgcatgaggct

SEQ ID NO: 2309 - DNA, 146 bp, Artificial Sequence
  Bisulfite Padlock Probe
  misc_feature 94, 95, 96, 97, 98, 99: n = A,T,C or G
gactggaagagcactgttacaactaccgaaaacgacaaacgtctcgttggaggctcatcgttcctattcaggcagatgttatcgaggtccgacnnnnnncacacccacccacaccgaaataaaaccgatcggatacgcatgaggct

SEQ ID NO: 2310 - DNA, 146 bp, Artificial Sequence
  Bisulfite Padlock Probe
  misc_feature 95, 96, 97, 98, 99, 100: n = A,T,C or G
gactggaagagcactgttacaactattacgaataaccacacaaaacgttggaggctcatcgttcctattcaggcagatgttatcgaggtccgacnnnnnnaaaaaccaccctattaaaaatcacccgatcggatacgcatgaggct

SEQ ID NO: 2311 - DNA, 146 bp, Artificial Sequence
  Bisulfite Padlock Probe
  misc_feature 95, 96, 97, 98, 99, 100: n = A,T,C or G
gactggaagagcactgttacaactattacgaataaccacgcaaaacgttggaggctcatcgttcctattcaggcagatgttatcgaggtccgacnnnnnnaaaaaccgccctattaaaaatcacccgatcggatacgcatgaggct

SEQ ID NO: 2312 - DNA, 146 bp, Artificial Sequence
  Bisulfite Padlock Probe
  misc_feature 95, 96, 97, 98, 99, 100: n = A,T,C or G
gactggaagagcactgttacaactcctacatcaaattcaacaccccgttggaggctcatcgttcctattcaggcagatgttatcgaggtccgacnnnnnnaaaaataaacaccgcgcactactatagatcggatacgcatgaggct

SEQ ID NO: 2313 - DNA, 146 bp, Artificial Sequence
  Bisulfite Padlock Probe
  misc_feature 95, 96, 97, 98, 99, 100: n = A,T,C or G
gactggaagagcactgttacaactcctacatcaaattcaacaccccgttggaggctcatcgttcctattcaggcagatgttatcgaggtccgacnnnnnnaaaaataaacaccgcgcgctactatagatcggatacgcatgaggct

SEQ ID NO: 2314 - DNA, 146 bp, Artificial Sequence
  Bisulfite Padlock Probe
  misc_feature 93, 94, 95, 96, 97, 98: n = A,T,C or G
gactggaagagcactgttacaataaaaacaccaaaccttctatcgttggaggctcatcgttcctattcaggcagatgttatcgaggtccgacnnnnnnaacacccaaacacaaaacctatactttcgatcggatacgcatgaggct

SEQ ID NO: 2315 - DNA, 146 bp, Artificial Sequence
  Bisulfite Padlock Probe
  misc_feature 93, 94, 95, 96, 97, 98: n = A,T,C or G
gactggaagagcactgttacaataaaaacaccgaaccttctatcgttggaggctcatcgttcctattcaggcagatgttatcgaggtccgacnnnnnnaacacccgaacacaaaacctatactttcgatcggatacgcatgaggct

SEQ ID NO: 2316 - DNA, 146 bp, Artificial Sequence
  Bisulfite Padlock Probe
  misc_feature 92, 93, 94, 95, 96, 97: n = A,T,C or G
gactggaagagcactgttacaatacgaactatacgcgcaatccgttggaggctcatcgttcctattcaggcagatgttatcgaggtccgacnnnnnnaccttaatatacttaatttcaaaattaaagatcggatacgcatgaggct

SEQ ID NO: 2317 - DNA, 146 bp, Artificial Sequence
  Bisulfite Padlock Probe
  misc_feature 92, 93, 94, 95, 96, 97: n = A,T,C or G
gactggaagagcactgttacaatacgaactatacgcgcgatccgttggaggctcatcgttcctattcaggcagatgttatcgaggtccgacnnnnnnaccttaatatacttaatttcgaaattaaagatcggatacgcatgaggct

SEQ ID NO: 2318 - DNA, 146 bp, Artificial Sequence
  Bisulfite Padlock Probe
  misc_feature 94, 95, 96, 97, 98, 99: n = A,T,C or G
gactggaagagcactgttacaatataacacgaacaccaatcctacgttggaggctcatcgttcctattcaggcagatgttatcgaggtccgacnnnnnntttaaacttaaatctacatcaacaaatgatcggatacgcatgaggct

SEQ ID NO: 2319 - DNA, 146 bp, Artificial Sequence
  Bisulfite Padlock Probe
  misc_feature 94, 95, 96, 97, 98, 99: n = A,T,C or G
gactggaagagcactgttacaatataacacgaacgccaatcctacgttggaggctcatcgttcctattcaggcagatgttatcgaggtccgacnnnnnntttaaacttaaatctacgtcaacaaatgatcggatacgcatgaggct

SEQ ID NO: 2320 - DNA, 146 bp, Artificial Sequence
  Bisulfite Padlock Probe
  misc_feature 92, 93, 94, 95, 96, 97: n = A,T,C or G
gactggaagagcactgttacaatcccactctacatcttcaaaagttggaggctcatcgttcctattcaggcagatgttatcgaggtccgacnnnnnnaccccatctactacaaaaacccccatcaagatcggatacgcatgaggct

SEQ ID NO: 2321 - DNA, 146 bp, Artificial Sequence
  Bisulfite Padlock Probe
  misc_feature 92, 93, 94, 95, 96, 97: n = A,T,C or G
gactggaagagcactgttacaatcgttccactatacctcaaaagttggaggctcatcgttcctattcaggcagatgttatcgaggtccgacnnnnnnaactaaacaactatctcactttaaaactagatcggatacgcatgaggct

SEQ ID NO: 2322 - DNA, 146 bp, Artificial Sequence
  Bisulfite Padlock Probe
  misc_feature 92, 93, 94, 95, 96, 97: n = A,T,C or G
gactggaagagcactgttacaatcgttccgctatacctcaaaagttggaggctcatcgttcctattcaggcagatgttatcgaggtccgacnnnnnnaactaaacaactatctcgctttaaaactagatcggatacgcatgaggct

SEQ ID NO: 2323 - DNA, 146 bp, Artificial Sequence
  Bisulfite Padlock Probe
  misc_feature 92, 93, 94, 95, 96, 97: n = A,T,C or G
gactggaagagcactgttacaatctcttatttctattcccaccgttggaggctcatcgttcctattcaggcagatgttatcgaggtccgacnnnnnnctaaataaaatacccaataaaacaaaaatgatcggatacgcatgaggct

SEQ ID NO: 2324 - DNA, 146 bp, Artificial Sequence
  Bisulfite Padlock Probe
  misc_feature 92, 93, 94, 95, 96, 97: n = A,T,C or G
gactggaagagcactgttacaattactcgcgaacaccaaacccgttggaggctcatcgttcctattcaggcagatgttatcgaggtccgacnnnnnntcctccttcctcatcaaaaacctactaacgatcggatacgcatgaggct

SEQ ID NO: 2325 - DNA, 146 bp, Artificial Sequence
  Bisulfite Padlock Probe
  misc_feature 92, 93, 94, 95, 96, 97: n = A,T,C or G
gactggaagagcactgttacaattactcgcgaacaccgaacccgttggaggctcatcgttcctattcaggcagatgttatcgaggtccgacnnnnnntcctccttcctcatcgaaaacctactaacgatcggatacgcatgaggct

SEQ ID NO: 2326 - DNA, 146 bp, Artificial Sequence
  Bisulfite Padlock Probe
  misc_feature 94, 95, 96, 97, 98, 99: n = A,T,C or G
gactggaagagcactgttacaatttaattataaatacacaaaaacgttggaggctcatcgttcctattcaggcagatgttatcgaggtccgacnnnnnnaatctaacctcccccaccttcaaattcgatcggatacgcatgaggct

SEQ ID NO: 2327 - DNA, 146 bp, Artificial Sequence
  Bisulfite Padlock Probe
  misc_feature 94, 95, 96, 97, 98, 99: n = A,T,C or G
gactggaagagcactgttacaatttaattataaatacacgaaaacgttggaggctcatcgttcctattcaggcagatgttatcgaggtccgacnnnnnnaatctaacctcccccaccttcaaattcgatcggatacgcatgaggct

SEQ ID NO: 2328 - DNA, 146 bp, Artificial Sequence
  Bisulfite Padlock Probe
  misc_feature 94, 95, 96, 97, 98, 99: n = A,T,C or G
gactggaagagcactgttacaatttctcctcctattcctctacccgttggaggctcatcgttcctattcaggcagatgttatcgaggtccgacnnnnnnaaatacgaacaacgacgaaacaatccagatcggatacgcatgaggct

SEQ ID NO: 2329 - DNA, 146 bp, Artificial Sequence
  Bisulfite Padlock Probe
  misc_feature 94, 95, 96, 97, 98, 99: n = A,T,C or G
gactggaagagcactgttacaatttctcctcctattcctctacccgttggaggctcatcgttcctattcaggcagatgttatcgaggtccgacnnnnnnaaatacgaacaacgacgaaacgatccagatcggatacgcatgaggct

SEQ ID NO: 2330 - DNA, 146 bp, Artificial Sequence
  Bisulfite Padlock Probe
  misc_feature 95, 96, 97, 98, 99, 100: n = A,T,C or G
gactggaagagcactgttacacaaaataacccaaataatacataacgttggaggctcatcgttcctattcaggcagatgttatcgaggtccgacnnnnnnacataacaaacaaactctaacttaccgatcggatacgcatgaggct

SEQ ID NO: 2331 - DNA, 146 bp, Artificial Sequence
  Bisulfite Padlock Probe
  misc_feature 94, 95, 96, 97, 98, 99: n = A,T,C or G
gactggaagagcactgttacacaaacgaataaaaacaccaaaaacgttggaggctcatcgttcctattcaggcagatgttatcgaggtccgacnnnnnnatcccccaacctcatcctacataactcgatcggatacgcatgaggct

SEQ ID NO: 2332 - DNA, 146 bp, Artificial Sequence
  Bisulfite Padlock Probe
  misc_feature 94, 95, 96, 97, 98, 99: n = A,T,C or G
gactggaagagcactgttacacaaacgaataaaaacaccgaaaacgttggaggctcatcgttcctattcaggcagatgttatcgaggtccgacnnnnnnatcccccgacctcatcctacataactcgatcggatacgcatgaggct

SEQ ID NO: 2333 - DNA, 146 bp, Artificial Sequence
  Bisulfite Padlock Probe
  misc_feature 93, 94, 95, 96, 97, 98: n = A,T,C or G
gactggaagagcactgttacacaaataaacgcgctctcaatcccgttggaggctcatcgttcctattcaggcagatgttatcgaggtccgacnnnnnnaaaaacaatataacgcgtacacactaacgatcggatacgcatgaggct

SEQ ID NO: 2334 - DNA, 146 bp, Artificial Sequence
  Bisulfite Padlock Probe
  misc_feature 93, 94, 95, 96, 97, 98: n = A,T,C or G
gactggaagagcactgttacacaaataaacgcgctctcgatcccgttggaggctcatcgttcctattcaggcagatgttatcgaggtccgacnnnnnnaaaaacaatataacgcgtacgcactaacgatcggatacgcatgaggct

SEQ ID NO: 2335 - DNA, 146 bp, Artificial Sequence
  Bisulfite Padlock Probe
  misc_feature 95, 96, 97, 98, 99, 100: n = A,T,C or G
gactggaagagcactgttacacaacatcctcttcctcctaactaccgttggaggctcatcgttcctattcaggcagatgttatcgaggtccgacnnnnnnaaaacgcgcgaacaaaacaaaaaaccgatcggatacgcatgaggct

SEQ ID NO: 2336 - DNA, 146 bp, Artificial Sequence
  Bisulfite Padlock Probe
  misc_feature 96, 97, 98, 99, 100, 101: n = A,T,C or G
gactggaagagcactgttacacaacttaaataaaattaaaatcctaagttggaggctcatcgttcctattcaggcagatgttatcgaggtccgacnnnnnngaaatcccgacaacacctaccctccgatcggatacgcatgaggct

SEQ ID NO: 2337 - DNA, 146 bp, Artificial Sequence
  Bisulfite Padlock Probe
  misc_feature 95, 96, 97, 98, 99, 100: n = A,T,C or G
gactggaagagcactgttacacacaaaacacaataatattaataacgttggaggctcatcgttcctattcaggcagatgttatcgaggtccgacnnnnnnttaataaaaaccatacatttctaaccgatcggatacgcatgaggct

SEQ ID NO: 2338 - DNA, 146 bp, Artificial Sequence
  Bisulfite Padlock Probe
  misc_feature 95, 96, 97, 98, 99, 100: n = A,T,C or G
gactggaagagcactgttacacacaaaacacgataatattaataacgttggaggctcatcgttcctattcaggcagatgttatcgaggtccgacnnnnnnttaataaaaaccgtacatttctaaccgatcggatacgcatgaggct

SEQ ID NO: 2339 - DNA, 146 bp, Artificial Sequence
  Bisulfite Padlock Probe
  misc_feature 93, 94, 95, 96, 97, 98: n = A,T,C or G
gactggaagagcactgttacaccaaacacctacccctaacacacgttggaggctcatcgttcctattcaggcagatgttatcgaggtccgacnnnnnnactccaaaactccaaaactcaaaaactcgatcggatacgcatgaggct

SEQ ID NO: 2340 - DNA, 146 bp, Artificial Sequence
  Bisulfite Padlock Probe
  misc_feature 93, 94, 95, 96, 97, 98: n = A,T,C or G
gactggaagagcactgttacaccaaacacctacccctaacacgcgttggaggctcatcgttcctattcaggcagatgttatcgaggtccgacnnnnnnactccaaaactccaaaactcgaaaactcgatcggatacgcatgaggct

SEQ ID NO: 2341 - DNA, 146 bp, Artificial Sequence
  Bisulfite Padlock Probe
  misc_feature 96, 97, 98, 99, 100, 101: n = A,T,C or G
gactggaagagcactgttacaccaaacactctaataaacctaacctagttggaggctcatcgttcctattcaggcagatgttatcgaggtccgacnnnnnnaaaataaaaccgacaaattaaaaacgatcggatacgcatgaggct

SEQ ID NO: 2342 - DNA, 146 bp, Artificial Sequence
  Bisulfite Padlock Probe
  misc_feature 96, 97, 98, 99, 100, 101: n = A,T,C or G
gactggaagagcactgttacaccaaacactctaataaacctaacctagttggaggctcatcgttcctattcaggcagatgttatcgaggtccgacnnnnnnaaaataaaaccgacgaattaaaaacgatcggatacgcatgaggct

SEQ ID NO: 2343 - DNA, 146 bp, Artificial Sequence
  Bisulfite Padlock Probe
  misc_feature 92, 93, 94, 95, 96, 97: n = A,T,C or G
gactggaagagcactgttacaccaaactcaccaaaatcaaaacgttggaggctcatcgttcctattcaggcagatgttatcgaggtccgacnnnnnnaacgtctaaaattccaaaaacacaaaacagatcggatacgcatgaggct

SEQ ID NO: 2344 - DNA, 146 bp, Artificial Sequence
  Bisulfite Padlock Probe
  misc_feature 92, 93, 94, 95, 96, 97: n = A,T,C or G
gactggaagagcactgttacaccaaactcaccaaaatcgaaacgttggaggctcatcgttcctattcaggcagatgttatcgaggtccgacnnnnnnaacgtctaaaattccaaaaacacaaaacggatcggatacgcatgaggct

SEQ ID NO: 2345 - DNA, 146 bp, Artificial Sequence
  Bisulfite Padlock Probe
  misc_feature 96, 97, 98, 99, 100, 101: n = A,T,C or G
gactggaagagcactgttacaccaaccccatttatcaaatacttaacgttggaggctcatcgttcctattcaggcagatgttatcgaggtccgacnnnnnnccaactttcacacctctcccaactcgatcggatacgcatgaggct

SEQ ID NO: 2346 - DNA, 146 bp, Artificial Sequence
  Bisulfite Padlock Probe
  misc_feature 96, 97, 98, 99, 100, 101: n = A,T,C or G
gactggaagagcactgttacaccaaccccatttatcaaatacttaacgttggaggctcatcgttcctattcaggcagatgttatcgaggtccgacnnnnnnccaactttcacgcctctcccaactcgatcggatacgcatgaggct

SEQ ID NO: 2347 - DNA, 146 bp, Artificial Sequence
  Bisulfite Padlock Probe
  misc_feature 92, 93, 94, 95, 96, 97: n = A,T,C or G
gactggaagagcactgttacaccaactctcatactataactacgttggaggctcatcgttcctattcaggcagatgttatcgaggtccgacnnnnnnacccccaacaaacgtaaataatcaacaccgatcggatacgcatgaggct

SEQ ID NO: 2348 - DNA, 146 bp, Artificial Sequence
  Bisulfite Padlock Probe
  misc_feature 92, 93, 94, 95, 96, 97: n = A,T,C or G
gactggaagagcactgttacacccaaaccaacccttactctccgttggaggctcatcgttcctattcaggcagatgttatcgaggtccgacnnnnnnaaaactaactccaataaccaaaccttatagatcggatacgcatgaggct

SEQ ID NO: 2349 - DNA, 146 bp, Artificial Sequence
  Bisulfite Padlock Probe
  misc_feature 92, 93, 94, 95, 96, 97: n = A,T,C or G
gactggaagagcactgttacacccaaaccgacccttactctccgttggaggctcatcgttcctattcaggcagatgttatcgaggtccgacnnnnnnaaaactaactccgataaccaaaccttatagatcggatacgcatgaggct

SEQ ID NO: 2350 - DNA, 146 bp, Artificial Sequence
  Bisulfite Padlock Probe
  misc_feature 92, 93, 94, 95, 96, 97: n = A,T,C or G
gactggaagagcactgttacacccaaactacaaaaccttttaagttggaggctcatcgttcctattcaggcagatgttatcgaggtccgacnnnnnncctaatacaccaaacctaaaaacaaaaccgatcggatacgcatgaggct

SEQ ID NO: 2351 - DNA, 146 bp, Artificial Sequence
  Bisulfite Padlock Probe
  misc_feature 92, 93, 94, 95, 96, 97: n = A,T,C or G
gactggaagagcactgttacacccctaaaaatactttctccacgttggaggctcatcgttcctattcaggcagatgttatcgaggtccgacnnnnnnactatacgccaaaaccctaaataaataaagatcggatacgcatgaggct

SEQ ID NO: 2352 - DNA, 146 bp, Artificial Sequence
  Bisulfite Padlock Probe
  misc_feature 92, 93, 94, 95, 96, 97: n = A,T,C or G
gactggaagagcactgttacacccctaaaaatactttctccacgttggaggctcatcgttcctattcaggcagatgttatcgaggtccgacnnnnnnactatacgccgaaaccctaaataaataaagatcggatacgcatgaggct

SEQ ID NO: 2353 - DNA, 146 bp, Artificial Sequence
  Bisulfite Padlock Probe
  misc_feature 95, 96, 97, 98, 99, 100: n = A,T,C or G
gactggaagagcactgttacacccgaaactaaaacataaccaaatcgttggaggctcatcgttcctattcaggcagatgttatcgaggtccgacnnnnnnaaccgaaataaacgtctcccgaacacgatcggatacgcatgaggct

SEQ ID NO: 2354 - DNA, 146 bp, Artificial Sequence
  Bisulfite Padlock Probe
  misc_feature 95, 96, 97, 98, 99, 100: n = A,T,C or G
gactggaagagcactgttacacccgaaactaaaacgtaaccaaatcgttggaggctcatcgttcctattcaggcagatgttatcgaggtccgacnnnnnnaaccgaaataaacgtctcccgaacgcgatcggatacgcatgaggct

SEQ ID NO: 2355 - DNA, 146 bp, Artificial Sequence
  Bisulfite Padlock Probe
  misc_feature 92, 93, 94, 95, 96, 97: n = A,T,C or G
gactggaagagcactgttacacccgaactacaaaaccttttaagttggaggctcatcgttcctattcaggcagatgttatcgaggtccgacnnnnnncctaatacgccaaacctaaaaacaaaaccgatcggatacgcatgaggct

SEQ ID NO: 2356 - DNA, 146 bp, Artificial Sequence
  Bisulfite Padlock Probe
  misc_feature 93, 94, 95, 96, 97, 98: n = A,T,C or G
gactggaagagcactgttacacccttcattcattcccaatccccgttggaggctcatcgttcctattcaggcagatgttatcgaggtccgacnnnnnntaaataacgcctcacttaacaaccacccgatcggatacgcatgaggct

SEQ ID NO: 2357 - DNA, 146 bp, Artificial Sequence
  Bisulfite Padlock Probe
  misc_feature 93, 94, 95, 96, 97, 98: n = A,T,C or G
gactggaagagcactgttacacccttcattcattcccaatccccgttggaggctcatcgttcctattcaggcagatgttatcgaggtccgacnnnnnntaaataacgcctcgcttaacaaccacccgatcggatacgcatgaggct

SEQ ID NO: 2358 - DNA, 146 bp, Artificial Sequence
  Bisulfite Padlock Probe
  misc_feature 92, 93, 94, 95, 96, 97: n = A,T,C or G
gactggaagagcactgttacaccgactctcatactataactacgttggaggctcatcgttcctattcaggcagatgttatcgaggtccgacnnnnnnacccccaacaaacgtaaataatcaacgccgatcggatacgcatgaggct

SEQ ID NO: 2359 - DNA, 146 bp, Artificial Sequence
  Bisulfite Padlock Probe
  misc_feature 94, 95, 96, 97, 98, 99: n = A,T,C or G
gactggaagagcactgttacacctaaacccttccttaactaatccgttggaggctcatcgttcctattcaggcagatgttatcgaggtccgacnnnnnngacttcacccaccttctttccccaatcgatcggatacgcatgaggct

SEQ ID NO: 2360 - DNA, 146 bp, Artificial Sequence
  Bisulfite Padlock Probe
  misc_feature 94, 95, 96, 97, 98, 99: n = A,T,C or G
gactggaagagcactgttacacctaaacccttccttaactaatccgttggaggctcatcgttcctattcaggcagatgttatcgaggtccgacnnnnnngacttcacccaccttctttccccgatcgatcggatacgcatgaggct

SEQ ID NO: 2361 - DNA, 146 bp, Artificial Sequence
  Bisulfite Padlock Probe
  misc_feature 92, 93, 94, 95, 96, 97: n = A,T,C or G
gactggaagagcactgttacacctaactcttcgaccacaaaacgttggaggctcatcgttcctattcaggcagatgttatcgaggtccgacnnnnnnctcctcaaccaccctacaactaatacaaagatcggatacgcatgaggct

SEQ ID NO: 2362 - DNA, 146 bp, Artificial Sequence
  Bisulfite Padlock Probe
  misc_feature 92, 93, 94, 95, 96, 97: n = A,T,C or G
gactggaagagcactgttacacctaactcttcgaccacgaaacgttggaggctcatcgttcctattcaggcagatgttatcgaggtccgacnnnnnnctcctcaaccaccctacaactaatacaaagatcggatacgcatgaggct

SEQ ID NO: 2363 - DNA, 146 bp, Artificial Sequence
  Bisulfite Padlock Probe
  misc_feature 92, 93, 94, 95, 96, 97: n = A,T,C or G
gactggaagagcactgttacacctataacctcccttcccctccgttggaggctcatcgttcctattcaggcagatgttatcgaggtccgacnnnnnnataaataaaacatcaactcccctataatcgatcggatacgcatgaggct

SEQ ID NO: 2364 - DNA, 146 bp, Artificial Sequence
  Bisulfite Padlock Probe
  misc_feature 92, 93, 94, 95, 96, 97: n = A,T,C or G
gactggaagagcactgttacaccttcttaaaaccccgaacaccgttggaggctcatcgttcctattcaggcagatgttatcgaggtccgacnnnnnncgaaaaacgacaactcccaaaattactttgatcggatacgcatgaggct

SEQ ID NO: 2365 - DNA, 146 bp, Artificial Sequence
  Bisulfite Padlock Probe
  misc_feature 92, 93, 94, 95, 96, 97: n = A,T,C or G
gactggaagagcactgttacaccttcttaaaaccccgaacgccgttggaggctcatcgttcctattcaggcagatgttatcgaggtccgacnnnnnncgaaaaacgacgactcccaaaattactttgatcggatacgcatgaggct

SEQ ID NO: 2366 - DNA, 146 bp, Artificial Sequence
  Bisulfite Padlock Probe
  misc_feature 95, 96, 97, 98, 99, 100: n = A,T,C or G
gactggaagagcactgttacacgaaataacccaaataatacataacgttggaggctcatcgttcctattcaggcagatgttatcgaggtccgacnnnnnnacataacaaacaaactctaacttaccgatcggatacgcatgaggct

SEQ ID NO: 2367 - DNA, 146 bp, Artificial Sequence
  Bisulfite Padlock Probe
  misc_feature 94, 95, 96, 97, 98, 99: n = A,T,C or G
gactggaagagcactgttacacgaacaaacaaacgaattaaacacgttggaggctcatcgttcctattcaggcagatgttatcgaggtccgacnnnnnnctaaatcctaaattaaaacaataaaaagatcggatacgcatgaggct

SEQ ID NO: 2368 - DNA, 146 bp, Artificial Sequence
  Bisulfite Padlock Probe
  misc_feature 94, 95, 96, 97, 98, 99: n = A,T,C or G
gactggaagagcactgttacacgaacaaacaaacgaattaaacgcgttggaggctcatcgttcctattcaggcagatgttatcgaggtccgacnnnnnnctaaatcctaaattaaaacaataaaaagatcggatacgcatgaggct

SEQ ID NO: 2369 - DNA, 146 bp, Artificial Sequence
  Bisulfite Padlock Probe
  misc_feature 95, 96, 97, 98, 99, 100: n = A,T,C or G
gactggaagagcactgttacacgaactccccgaaatccaaactatcgttggaggctcatcgttcctattcaggcagatgttatcgaggtccgacnnnnnnaaaaacaccaacaaaaacgaccaatagatcggatacgcatgaggct

SEQ ID NO: 2370 - DNA, 146 bp, Artificial Sequence
  Bisulfite Padlock Probe
  misc_feature 95, 96, 97, 98, 99, 100: n = A,T,C or G
gactggaagagcactgttacacgaactccccgaaatccgaactatcgttggaggctcatcgttcctattcaggcagatgttatcgaggtccgacnnnnnnaaaaacaccaacaaaaacgaccgatagatcggatacgcatgaggct

SEQ ID NO: 2371 - DNA, 146 bp, Artificial Sequence
  Bisulfite Padlock Probe
  misc_feature 92, 93, 94, 95, 96, 97: n = A,T,C or G
gactggaagagcactgttacacgccaaaaacacatatcaaaaagttggaggctcatcgttcctattcaggcagatgttatcgaggtccgacnnnnnnctttcactaaaaacactaatcctaaaaacgatcggatacgcatgaggct

SEQ ID NO: 2372 - DNA, 146 bp, Artificial Sequence
  Bisulfite Padlock Probe
  misc_feature 92, 93, 94, 95, 96, 97: n = A,T,C or G
gactggaagagcactgttacacgccgaaaacacatatcaaaaagttggaggctcatcgttcctattcaggcagatgttatcgaggtccgacnnnnnnctttcgctaaaaacactaatcctaaaaacgatcggatacgcatgaggct

SEQ ID NO: 2373 - DNA, 146 bp, Artificial Sequence
  Bisulfite Padlock Probe
  misc_feature 93, 94, 95, 96, 97, 98: n = A,T,C or G
gactggaagagcactgttacacgcctaactctcccaaaaacctcgttggaggctcatcgttcctattcaggcagatgttatcgaggtccgacnnnnnncccgaaccaaaacctctacaaacaaaaagatcggatacgcatgaggct

SEQ ID NO: 2374 - DNA, 146 bp, Artificial Sequence
  Bisulfite Padlock Probe
  misc_feature 93, 94, 95, 96, 97, 98: n = A,T,C or G
gactggaagagcactgttacacgcctaactctcccgaaaacctcgttggaggctcatcgttcctattcaggcagatgttatcgaggtccgacnnnnnncccgaaccgaaacctctacaaacaaaaagatcggatacgcatgaggct

SEQ ID NO: 2375 - DNA, 146 bp, Artificial Sequence
  Bisulfite Padlock Probe
  misc_feature 95, 96, 97, 98, 99, 100: n = A,T,C or G
gactggaagagcactgttacacgttacataaccaacctaaaaccccgttggaggctcatcgttcctattcaggcagatgttatcgaggtccgacnnnnnnaaaaatcaaaatctaataaacccttcgatcggatacgcatgaggct

SEQ ID NO: 2376 - DNA, 146 bp, Artificial Sequence
  Bisulfite Padlock Probe
  misc_feature 95, 96, 97, 98, 99, 100: n = A,T,C or G
gactggaagagcactgttacacgttacataaccgacctaaaaccccgttggaggctcatcgttcctattcaggcagatgttatcgaggtccgacnnnnnnaaaaatcaaaatctaataaacccttcgatcggatacgcatgaggct

SEQ ID NO: 2377 - DNA, 146 bp, Artificial Sequence
  Bisulfite Padlock Probe
  misc_feature 92, 93, 94, 95, 96, 97: n = A,T,C or G
gactggaagagcactgttacactaaaaatacctaaaaacacaagttggaggctcatcgttcctattcaggcagatgttatcgaggtccgacnnnnnnctcaacatccacttccaaacaaaccaaccgatcggatacgcatgaggct

SEQ ID NO: 2378 - DNA, 146 bp, Artificial Sequence
  Bisulfite Padlock Probe
  misc_feature 94, 95, 96, 97, 98, 99: n = A,T,C or G
gactggaagagcactgttacactacaccaacctaaaactactaccgttggaggctcatcgttcctattcaggcagatgttatcgaggtccgacnnnnnnctaaacaacctaaaaccctaataattcgatcggatacgcatgaggct

SEQ ID NO: 2379 - DNA, 146 bp, Artificial Sequence
  Bisulfite Padlock Probe
  misc_feature 94, 95, 96, 97, 98, 99: n = A,T,C or G
gactggaagagcactgttacactacgccaacctaaaactactaccgttggaggctcatcgttcctattcaggcagatgttatcgaggtccgacnnnnnnctaaacgacctaaaaccctaataattcgatcggatacgcatgaggct

SEQ ID NO: 2380 - DNA, 146 bp, Artificial Sequence
  Bisulfite Padlock Probe
  misc_feature 93, 94, 95, 96, 97, 98: n = A,T,C or G
gactggaagagcactgttacactattacatcaatatttctttaagttggaggctcatcgttcctattcaggcagatgttatcgaggtccgacnnnnnnatccaaaacaaacttataaaataaaatcgatcggatacgcatgaggct

SEQ ID NO: 2381 - DNA, 146 bp, Artificial Sequence
  Bisulfite Padlock Probe
  misc_feature 92, 93, 94, 95, 96, 97: n = A,T,C or G
gactggaagagcactgttacactcaaaataaccttaataaaaagttggaggctcatcgttcctattcaggcagatgttatcgaggtccgacnnnnnnaaaataaaccccaaaccaatactaaacacgatcggatacgcatgaggct

SEQ ID NO: 2382 - DNA, 146 bp, Artificial Sequence
  Bisulfite Padlock Probe
  misc_feature 96, 97, 98, 99, 100, 101: n = A,T,C or G
gactggaagagcactgttacactcaccaaataataaacaccaaactcgttggaggctcatcgttcctattcaggcagatgttatcgaggtccgacnnnnnnccgaacctcacccacgtacaacatagatcggatacgcatgaggct

SEQ ID NO: 2383 - DNA, 146 bp, Artificial Sequence
  Bisulfite Padlock Probe
  misc_feature 96, 97, 98, 99, 100, 101: n = A,T,C or G
gactggaagagcactgttacactcaccaaataataaacgccaaactcgttggaggctcatcgttcctattcaggcagatgttatcgaggtccgacnnnnnnccgaacctcacccacgtacaacgtagatcggatacgcatgaggct

SEQ ID NO: 2384 - DNA, 146 bp, Artificial Sequence
  Bisulfite Padlock Probe
  misc_feature 93, 94, 95, 96, 97, 98: n = A,T,C or G
gactggaagagcactgttacataaaaactataaactaaactttcgttggaggctcatcgttcctattcaggcagatgttatcgaggtccgacnnnnnnccgcaaataaaaatcccgaaaacaaaacgatcggatacgcatgaggct

SEQ ID NO: 2385 - DNA, 146 bp, Artificial Sequence
  Bisulfite Padlock Probe
  misc_feature 93, 94, 95, 96, 97, 98: n = A,T,C or G
gactggaagagcactgttacataaaaactataaactaaactttcgttggaggctcatcgttcctattcaggcagatgttatcgaggtccgacnnnnnnccgcaaataaaaatcccgaaaacgaaacgatcggatacgcatgaggct

SEQ ID NO: 2386 - DNA, 146 bp, Artificial Sequence
  Bisulfite Padlock Probe
  misc_feature 96, 97, 98, 99, 100, 101: n = A,T,C or G
gactggaagagcactgttacataaacataaaaatactaaactaaaccgttggaggctcatcgttcctattcaggcagatgttatcgaggtccgacnnnnnnaaacaaataaaaccatcgacccatcgatcggatacgcatgaggct

SEQ ID NO: 2387 - DNA, 146 bp, Artificial Sequence
  Bisulfite Padlock Probe
  misc_feature 96, 97, 98, 99, 100, 101: n = A,T,C or G
gactggaagagcactgttacataaacgtaaaaatactaaactaaaccgttggaggctcatcgttcctattcaggcagatgttatcgaggtccgacnnnnnnaaacaaataaaaccatcgacccgtcgatcggatacgcatgaggct

SEQ ID NO: 2388 - DNA, 146 bp, Artificial Sequence
  Bisulfite Padlock Probe
  misc_feature 92, 93, 94, 95, 96, 97: n = A,T,C or G
gactggaagagcactgttacataataacccataaaaccctaccgttggaggctcatcgttcctattcaggcagatgttatcgaggtccgacnnnnnnaccaccatcacgtacctaataacaaacttgatcggatacgcatgaggct

SEQ ID NO: 2389 - DNA, 146 bp, Artificial Sequence
  Bisulfite Padlock Probe
  misc_feature 94, 95, 96, 97, 98, 99: n = A,T,C or G
gactggaagagcactgttacatacaaaacctactctttaattaaagttggaggctcatcgttcctattcaggcagatgttatcgaggtccgacnnnnnnacaacgatacaaacaaaaccaaaccccgatcggatacgcatgaggct

SEQ ID NO: 2390 - DNA, 146 bp, Artificial Sequence
  Bisulfite Padlock Probe
  misc_feature 93, 94, 95, 96, 97, 98: n = A,T,C or G
gactggaagagcactgttacatataacctacgaaacaacaaaaagttggaggctcatcgttcctattcaggcagatgttatcgaggtccgacnnnnnnaaatcctcgaaactacgcaaactacaacgatcggatacgcatgaggct

SEQ ID NO: 2391 - DNA, 146 bp, Artificial Sequence
  Bisulfite Padlock Probe
  misc_feature 93, 94, 95, 96, 97, 98: n = A,T,C or G
gactggaagagcactgttacatataacctacgaaacgacaaaaagttggaggctcatcgttcctattcaggcagatgttatcgaggtccgacnnnnnnaaatcctcgaaactacgcaaactacgacgatcggatacgcatgaggct

SEQ ID NO: 2392 - DNA, 146 bp, Artificial Sequence
  Bisulfite Padlock Probe
  misc_feature 93, 94, 95, 96, 97, 98: n = A,T,C or G
gactggaagagcactgttacatatccccattaaaactcctaaacgttggaggctcatcgttcctattcaggcagatgttatcgaggtccgacnnnnnnctacgtaaaaccaatcactatccaaaccgatcggatacgcatgaggct

SEQ ID NO: 2393 - DNA, 146 bp, Artificial Sequence
  Bisulfite Padlock Probe
  misc_feature 96, 97, 98, 99, 100, 101: n = A,T,C or G
gactggaagagcactgttacatcaaatacctactacttaacttcaacgttggaggctcatcgttcctattcaggcagatgttatcgaggtccgacnnnnnnccaaccacgccgcttaaaatccacagatcggatacgcatgaggct

SEQ ID NO: 2394 - DNA, 146 bp, Artificial Sequence
  Bisulfite Padlock Probe
  misc_feature 96, 97, 98, 99, 100, 101: n = A,T,C or G
gactggaagagcactgttacatcaaatacctactacttaacttcaacgttggaggctcatcgttcctattcaggcagatgttatcgaggtccgacnnnnnnccaaccacgccgcttaaaatccacggatcggatacgcatgaggct

SEQ ID NO: 2395 - DNA, 146 bp, Artificial Sequence
  Bisulfite Padlock Probe
  misc_feature 92, 93, 94, 95, 96, 97: n = A,T,C or G
gactggaagagcactgttacatcaacatcaataaattcaaaacgttggaggctcatcgttcctattcaggcagatgttatcgaggtccgacnnnnnnaaaatccaaaacaaattacccttaaataagatcggatacgcatgaggct

SEQ ID NO: 2396 - DNA, 146 bp, Artificial Sequence
  Bisulfite Padlock Probe
  misc_feature 92, 93, 94, 95, 96, 97: n = A,T,C or G
gactggaagagcactgttacatcaacatcaataaattcgaaacgttggaggctcatcgttcctattcaggcagatgttatcgaggtccgacnnnnnnaaaatccaaaacaaattacccttaaataagatcggatacgcatgaggct

SEQ ID NO: 2397 - DNA, 146 bp, Artificial Sequence
  Bisulfite Padlock Probe
  misc_feature 92, 93, 94, 95, 96, 97: n = A,T,C or G
gactggaagagcactgttacatccaacacccccaaaatccaccgttggaggctcatcgttcctattcaggcagatgttatcgaggtccgacnnnnnnccctcccctccctaatcccctaaactttagatcggatacgcatgaggct

SEQ ID NO: 2398 - DNA, 146 bp, Artificial Sequence
  Bisulfite Padlock Probe
  misc_feature 92, 93, 94, 95, 96, 97: n = A,T,C or G
gactggaagagcactgttacatccaacacccccgaaatccaccgttggaggctcatcgttcctattcaggcagatgttatcgaggtccgacnnnnnnccctcccctccctaatcccctaaactttagatcggatacgcatgaggct

SEQ ID NO: 2399 - DNA, 146 bp, Artificial Sequence
  Bisulfite Padlock Probe
  misc_feature 92, 93, 94, 95, 96, 97: n = A,T,C or G
gactggaagagcactgttacatcccaaaccccgcaccatatacgttggaggctcatcgttcctattcaggcagatgttatcgaggtccgacnnnnnntaaaacctaaatctaacttttaaatctatgatcggatacgcatgaggct

SEQ ID NO: 2400 - DNA, 146 bp, Artificial Sequence
  Bisulfite Padlock Probe
  misc_feature 92, 93, 94, 95, 96, 97: n = A,T,C or G
gactggaagagcactgttacatcccaaaccccgcaccgtatacgttggaggctcatcgttcctattcaggcagatgttatcgaggtccgacnnnnnntaaaacctaaatctaacttttaaatctatgatcggatacgcatgaggct

SEQ ID NO: 2401 - DNA, 146 bp, Artificial Sequence
  Bisulfite Padlock Probe
  misc_feature 96, 97, 98, 99, 100, 101: n = A,T,C or G
gactggaagagcactgttacatcccctacccacctaaaaattaaaaagttggaggctcatcgttcctattcaggcagatgttatcgaggtccgacnnnnnnccacccaaccactaccccaaaaaacgatcggatacgcatgaggct

SEQ ID NO: 2402 - DNA, 146 bp, Artificial Sequence
  Bisulfite Padlock Probe
  misc_feature 96, 97, 98, 99, 100, 101: n = A,T,C or G
gactggaagagcactgttacatcccctacccgcctaaaaattaaaaagttggaggctcatcgttcctattcaggcagatgttatcgaggtccgacnnnnnnccacccaaccactaccccgaaaaacgatcggatacgcatgaggct

SEQ ID NO: 2403 - DNA, 146 bp, Artificial Sequence
  Bisulfite Padlock Probe
  misc_feature 95, 96, 97, 98, 99, 100: n = A,T,C or G
gactggaagagcactgttacatccgactacgcttcaaaaaacaaccgttggaggctcatcgttcctattcaggcagatgttatcgaggtccgacnnnnnncccaaccaccacgtaaaaaccaacttgatcggatacgcatgaggct

SEQ ID NO: 2404 - DNA, 146 bp, Artificial Sequence
  Bisulfite Padlock Probe
  misc_feature 95, 96, 97, 98, 99, 100: n = A,T,C or G
gactggaagagcactgttacatccgactacgcttcgaaaaacaaccgttggaggctcatcgttcctattcaggcagatgttatcgaggtccgacnnnnnncccaaccaccacgtaaaaaccgacttgatcggatacgcatgaggct

SEQ ID NO: 2405 - DNA, 146 bp, Artificial Sequence
  Bisulfite Padlock Probe
  misc_feature 93, 94, 95, 96, 97, 98: n = A,T,C or G
gactggaagagcactgttacatcctaaacctaataatcaacaccgttggaggctcatcgttcctattcaggcagatgttatcgaggtccgacnnnnnntaaccgaaaccatcttcatcaaaatcacgatcggatacgcatgaggct

SEQ ID NO: 2406 - DNA, 146 bp, Artificial Sequence
  Bisulfite Padlock Probe
  misc_feature 93, 94, 95, 96, 97, 98: n = A,T,C or G
gactggaagagcactgttacatcctaaacctaataatcaacgccgttggaggctcatcgttcctattcaggcagatgttatcgaggtccgacnnnnnntaaccgaaaccatcttcgtcaaaatcacgatcggatacgcatgaggct

SEQ ID NO: 2407 - DNA, 146 bp, Artificial Sequence
  Bisulfite Padlock Probe
  misc_feature 96, 97, 98, 99, 100, 101: n = A,T,C or G
gactggaagagcactgttacatcctcaccaactttatcatactaatcgttggaggctcatcgttcctattcaggcagatgttatcgaggtccgacnnnnnnaactactcgaccgaactaccgcaaagatcggatacgcatgaggct

SEQ ID NO: 2408 - DNA, 146 bp, Artificial Sequence
  Bisulfite Padlock Probe
  misc_feature 96, 97, 98, 99, 100, 101: n = A,T,C or G
gactggaagagcactgttacatcctcaccgactttatcatactaatcgttggaggctcatcgttcctattcaggcagatgttatcgaggtccgacnnnnnnaactactcgaccgaactaccgcgaagatcggatacgcatgaggct

SEQ ID NO: 2409 - DNA, 146 bp, Artificial Sequence
  Bisulfite Padlock Probe
  misc_feature 92, 93, 94, 95, 96, 97: n = A,T,C or G
gactggaagagcactgttacatcctcctaccttcctactactcgttggaggctcatcgttcctattcaggcagatgttatcgaggtccgacnnnnnnctaaccccctaattcctaaaaacctaaaagatcggatacgcatgaggct

SEQ ID NO: 2410 - DNA, 146 bp, Artificial Sequence
  Bisulfite Padlock Probe
  misc_feature 94, 95, 96, 97, 98, 99: n = A,T,C or G
gactggaagagcactgttacatctacttcttcaaaaatttctccagttggaggctcatcgttcctattcaggcagatgttatcgaggtccgacnnnnnnctccaaccccgactcgacaaaaaactcgatcggatacgcatgaggct

SEQ ID NO: 2411 - DNA, 146 bp, Artificial Sequence
  Bisulfite Padlock Probe
  misc_feature 92, 93, 94, 95, 96, 97: n = A,T,C or G
gactggaagagcactgttacatctcttcctcactacaacctacgttggaggctcatcgttcctattcaggcagatgttatcgaggtccgacnnnnnnaaaaacacaccaaaaatacctacccttccgatcggatacgcatgaggct

SEQ ID NO: 2412 - DNA, 146 bp, Artificial Sequence
  Bisulfite Padlock Probe
  misc_feature 95, 96, 97, 98, 99, 100: n = A,T,C or G
gactggaagagcactgttacattcctaaaacatttcttccaaaactgttggaggctcatcgttcctattcaggcagatgttatcgaggtccgacnnnnnnttacccaaaccaattccccgcaacaagatcggatacgcatgaggct

SEQ ID NO: 2413 - DNA, 146 bp, Artificial Sequence
  Bisulfite Padlock Probe
  misc_feature 95, 96, 97, 98, 99, 100: n = A,T,C or G
gactggaagagcactgttaccaaaaaactattaaaataacaaaaacgttggaggctcatcgttcctattcaggcagatgttatcgaggtccgacnnnnnnctaataatttcaccactctatataaagatcggatacgcatgaggct

SEQ ID NO: 2414 - DNA, 146 bp, Artificial Sequence
  Bisulfite Padlock Probe
  misc_feature 95, 96, 97, 98, 99, 100: n = A,T,C or G
gactggaagagcactgttaccaaaaactttacccctcaaaatccccgttggaggctcatcgttcctattcaggcagatgttatcgaggtccgacnnnnnnactcgtaacacctaacatctcccctcgatcggatacgcatgaggct

SEQ ID NO: 2415 - DNA, 146 bp, Artificial Sequence
  Bisulfite Padlock Probe
  misc_feature 95, 96, 97, 98, 99, 100: n = A,T,C or G
gactggaagagcactgttaccaaaaactttacccctcgaaatccccgttggaggctcatcgttcctattcaggcagatgttatcgaggtccgacnnnnnnactcgtaacacctaacgtctcccctcgatcggatacgcatgaggct

SEQ ID NO: 2416 - DNA, 146 bp, Artificial Sequence
  Bisulfite Padlock Probe
  misc_feature 95, 96, 97, 98, 99, 100: n = A,T,C or G
gactggaagagcactgttaccaaaaataaaaattaataaaacaactgttggaggctcatcgttcctattcaggcagatgttatcgaggtccgacnnnnnnaaactccctcttcatccccatccaaagatcggatacgcatgaggct

SEQ ID NO: 2417 - DNA, 146 bp, Artificial Sequence
  Bisulfite Padlock Probe
  misc_feature 95, 96, 97, 98, 99, 100: n = A,T,C or G
gactggaagagcactgttaccaaaaataaaaattaataaaacaactgttggaggctcatcgttcctattcaggcagatgttatcgaggtccgacnnnnnnaaactccctcttcatccccatccgaagatcggatacgcatgaggct

SEQ ID NO: 2418 - DNA, 146 bp, Artificial Sequence
  Bisulfite Padlock Probe
  misc_feature 92, 93, 94, 95, 96, 97: n = A,T,C or G
gactggaagagcactgttaccaaacaaaaactaaaaactcaccgttggaggctcatcgttcctattcaggcagatgttatcgaggtccgacnnnnnnaaaacccgaacctaccaaataccaaattcgatcggatacgcatgaggct

SEQ ID NO: 2419 - DNA, 146 bp, Artificial Sequence
  Bisulfite Padlock Probe
  misc_feature 96, 97, 98, 99, 100, 101: n = A,T,C or G
gactggaagagcactgttaccaaacaaaatctaataaaatctacctcgttggaggctcatcgttcctattcaggcagatgttatcgaggtccgacnnnnnntaacctcccccttctccacaccctcgatcggatacgcatgaggct

SEQ ID NO: 2420 - DNA, 146 bp, Artificial Sequence
  Bisulfite Padlock Probe
  misc_feature 96, 97, 98, 99, 100, 101: n = A,T,C or G
gactggaagagcactgttaccaaacacaactaaacctttaaccaatcgttggaggctcatcgttcctattcaggcagatgttatcgaggtccgacnnnnnntaaattaaacctttatcctaaactcgatcggatacgcatgaggct

SEQ ID NO: 2421 - DNA, 146 bp, Artificial Sequence
  Bisulfite Padlock Probe
  misc_feature 93, 94, 95, 96, 97, 98: n = A,T,C or G
gactggaagagcactgttaccaaaccaaaaccctccaaactaacgttggaggctcatcgttcctattcaggcagatgttatcgaggtccgacnnnnnnaaaaaccaaaatccacctaaaaacctaagatcggatacgcatgaggct

SEQ ID NO: 2422 - DNA, 146 bp, Artificial Sequence
  Bisulfite Padlock Probe
  misc_feature 93, 94, 95, 96, 97, 98: n = A,T,C or G
gactggaagagcactgttaccaaaccaaaaccctccgaactaacgttggaggctcatcgttcctattcaggcagatgttatcgaggtccgacnnnnnnaaaaaccaaaatccgcctaaaaacctaagatcggatacgcatgaggct

SEQ ID NO: 2423 - DNA, 146 bp, Artificial Sequence
  Bisulfite Padlock Probe
  misc_feature 93, 94, 95, 96, 97, 98: n = A,T,C or G
gactggaagagcactgttaccaaacctaatctcctaaaaatcccgttggaggctcatcgttcctattcaggcagatgttatcgaggtccgacnnnnnnaataaaaaccctcgaaactactcaaacagatcggatacgcatgaggct

SEQ ID NO: 2424 - DNA, 146 bp, Artificial Sequence
  Bisulfite Padlock Probe
  misc_feature 93, 94, 95, 96, 97, 98: n = A,T,C or G
gactggaagagcactgttaccaaacctaatctcctaaaaatcccgttggaggctcatcgttcctattcaggcagatgttatcgaggtccgacnnnnnnaataaaaaccctcgaaactactcgaacagatcggatacgcatgaggct

SEQ ID NO: 2425 - DNA, 146 bp, Artificial Sequence
  Bisulfite Padlock Probe
  misc_feature 92, 93, 94, 95, 96, 97: n = A,T,C or G
gactggaagagcactgttaccaaacgaaaactaaaaactcaccgttggaggctcatcgttcctattcaggcagatgttatcgaggtccgacnnnnnnaaaacccgaacctaccaaataccgaattcgatcggatacgcatgaggct

SEQ ID NO: 2426 - DNA, 146 bp, Artificial Sequence
  Bisulfite Padlock Probe
  misc_feature 96, 97, 98, 99, 100, 101: n = A,T,C or G
gactggaagagcactgttaccaaacgacaaatactatttaaacttaagttggaggctcatcgttcctattcaggcagatgttatcgaggtccgacnnnnnnaaaaactacgcaaatataaaatccagatcggatacgcatgaggct

SEQ ID NO: 2427 - DNA, 146 bp, Artificial Sequence
  Bisulfite Padlock Probe
  misc_feature 96, 97, 98, 99, 100, 101: n = A,T,C or G
gactggaagagcactgttaccaaacgacgaatactatttaaacttaagttggaggctcatcgttcctattcaggcagatgttatcgaggtccgacnnnnnnaaaaactacgcaaatataaaatccggatcggatacgcatgaggct

SEQ ID NO: 2428 - DNA, 146 bp, Artificial Sequence
  Bisulfite Padlock Probe
  misc_feature 96, 97, 98, 99, 100, 101: n = A,T,C or G
gactggaagagcactgttaccaaataaaacaacaaacgaccgcacaagttggaggctcatcgttcctattcaggcagatgttatcgaggtccgacnnnnnnaatcgatcaacgacaaccaaactacgatcggatacgcatgaggct

SEQ ID NO: 2429 - DNA, 146 bp, Artificial Sequence
  Bisulfite Padlock Probe
  misc_feature 96, 97, 98, 99, 100, 101: n = A,T,C or G
gactggaagagcactgttaccaaataaaacaacaaacgaccgcgcaagttggaggctcatcgttcctattcaggcagatgttatcgaggtccgacnnnnnnaatcgatcaacgacaaccgaactacgatcggatacgcatgaggct

SEQ ID NO: 2430 - DNA, 146 bp, Artificial Sequence
  Bisulfite Padlock Probe
  misc_feature 96, 97, 98, 99, 100, 101: n = A,T,C or G
gactggaagagcactgttaccaaattaaaaccctcctaactccatccgttggaggctcatcgttcctattcaggcagatgttatcgaggtccgacnnnnnnccaccgtccgcttcccaaaatacttgatcggatacgcatgaggct

SEQ ID NO: 2431 - DNA, 146 bp, Artificial Sequence
  Bisulfite Padlock Probe
  misc_feature 96, 97, 98, 99, 100, 101: n = A,T,C or G
gactggaagagcactgttaccaaattaaaaccctcctaactccgtccgttggaggctcatcgttcctattcaggcagatgttatcgaggtccgacnnnnnnccaccgtccgcttcccgaaatacttgatcggatacgcatgaggct

SEQ ID NO: 2432 - DNA, 146 bp, Artificial Sequence
  Bisulfite Padlock Probe
  misc_feature 92, 93, 94, 95, 96, 97: n = A,T,C or G
gactggaagagcactgttaccaaattaacttaataaacaaatcgttggaggctcatcgttcctattcaggcagatgttatcgaggtccgacnnnnnntaactattccgaaaacccccaaaaccctagatcggatacgcatgaggct

SEQ ID NO: 2433 - DNA, 146 bp, Artificial Sequence
  Bisulfite Padlock Probe
  misc_feature 92, 93, 94, 95, 96, 97: n = A,T,C or G
gactggaagagcactgttaccaaattaacttaataaacaaatcgttggaggctcatcgttcctattcaggcagatgttatcgaggtccgacnnnnnntaactattccgaaaacccccgaaaccctagatcggatacgcatgaggct

SEQ ID NO: 2434 - DNA, 146 bp, Artificial Sequence
  Bisulfite Padlock Probe
  misc_feature 93, 94, 95, 96, 97, 98: n = A,T,C or G
gactggaagagcactgttaccaaattccaaacaaaaacctttaagttggaggctcatcgttcctattcaggcagatgttatcgaggtccgacnnnnnnaaaacaaccgcaaaaccaaaaactccccgatcggatacgcatgaggct

SEQ ID NO: 2435 - DNA, 146 bp, Artificial Sequence
  Bisulfite Padlock Probe
  misc_feature 93, 94, 95, 96, 97, 98: n = A,T,C or G
gactggaagagcactgttaccaaattccaaacaaaaacctttaagttggaggctcatcgttcctattcaggcagatgttatcgaggtccgacnnnnnnaaaacaaccgcgaaaccaaaaactccccgatcggatacgcatgaggct

SEQ ID NO: 2436 - DNA, 146 bp, Artificial Sequence
  Bisulfite Padlock Probe
  misc_feature 93, 94, 95, 96, 97, 98: n = A,T,C or G
gactggaagagcactgttaccaaatttctaaactttcttaaaaagttggaggctcatcgttcctattcaggcagatgttatcgaggtccgacnnnnnnctaccaaaatctacccacaacctaacacgatcggatacgcatgaggct

SEQ ID NO: 2437 - DNA, 146 bp, Artificial Sequence
  Bisulfite Padlock Probe
  misc_feature 95, 96, 97, 98, 99, 100: n = A,T,C or G
gactggaagagcactgttaccaacaactaaacacaaatctctactagttggaggctcatcgttcctattcaggcagatgttatcgaggtccgacnnnnnntaaccctaaacaacctaaacctacccgatcggatacgcatgaggct

SEQ ID NO: 2438 - DNA, 146 bp, Artificial Sequence
  Bisulfite Padlock Probe
  misc_feature 95, 96, 97, 98, 99, 100: n = A,T,C or G
gactggaagagcactgttaccaacaactaaacgcaaatctctactagttggaggctcatcgttcctattcaggcagatgttatcgaggtccgacnnnnnntaaccctaaacgacctaaacctacccgatcggatacgcatgaggct

SEQ ID NO: 2439 - DNA, 146 bp, Artificial Sequence
  Bisulfite Padlock Probe
  misc_feature 92, 93, 94, 95, 96, 97: n = A,T,C or G
gactggaagagcactgttaccaacaactcaaatatttaataaagttggaggctcatcgttcctattcaggcagatgttatcgaggtccgacnnnnnnaaaaaccaacctccgataacgaacaaaaagatcggatacgcatgaggct

SEQ ID NO: 2440 - DNA, 146 bp, Artificial Sequence
  Bisulfite Padlock Probe
  misc_feature 92, 93, 94, 95, 96, 97: n = A,T,C or G
gactggaagagcactgttaccaacaactcgaatatttaataaagttggaggctcatcgttcctattcaggcagatgttatcgaggtccgacnnnnnnaaaaaccaacctccgataacgaacgaaaagatcggatacgcatgaggct

SEQ ID NO: 2441 - DNA, 146 bp, Artificial Sequence
  Bisulfite Padlock Probe
  misc_feature 95, 96, 97, 98, 99, 100: n = A,T,C or G
gactggaagagcactgttaccaacataactttcctaaaaataaaccgttggaggctcatcgttcctattcaggcagatgttatcgaggtccgacnnnnnnaacgtatactcgaacgacccaaaaccgatcggatacgcatgaggct

SEQ ID NO: 2442 - DNA, 146 bp, Artificial Sequence
  Bisulfite Padlock Probe
  misc_feature 95, 96, 97, 98, 99, 100: n = A,T,C or G
gactggaagagcactgttaccaacataactttcctaaaaataaaccgttggaggctcatcgttcctattcaggcagatgttatcgaggtccgacnnnnnnaacgtatactcgaacgacccgaaaccgatcggatacgcatgaggct

SEQ ID NO: 2443 - DNA, 146 bp, Artificial Sequence
  Bisulfite Padlock Probe
  misc_feature 94, 95, 96, 97, 98, 99: n = A,T,C or G
gactggaagagcactgttaccaacccaaacaacaaaaacaattatgttggaggctcatcgttcctattcaggcagatgttatcgaggtccgacnnnnnnttataactcaacacccacccccaaaacgatcggatacgcatgaggct

SEQ ID NO: 2444 - DNA, 146 bp, Artificial Sequence
  Bisulfite Padlock Probe
  misc_feature 94, 95, 96, 97, 98, 99: n = A,T,C or G
gactggaagagcactgttaccaacccaaacaacaaaaacgattatgttggaggctcatcgttcctattcaggcagatgttatcgaggtccgacnnnnnnttataactcaacacccacccccaaaacgatcggatacgcatgaggct

SEQ ID NO: 2445 - DNA, 146 bp, Artificial Sequence
  Bisulfite Padlock Probe
  misc_feature 96, 97, 98, 99, 100, 101: n = A,T,C or G
gactggaagagcactgttaccaacctaaattcccccaaaaacaaaaagttggaggctcatcgttcctattcaggcagatgttatcgaggtccgacnnnnnnaccaaatctcatttacatccaaaaagatcggatacgcatgaggct

SEQ ID NO: 2446 - DNA, 146 bp, Artificial Sequence
  Bisulfite Padlock Probe
  misc_feature 95, 96, 97, 98, 99, 100: n = A,T,C or G
gactggaagagcactgttaccaacgcgaaaactaaaactaaaacacgttggaggctcatcgttcctattcaggcagatgttatcgaggtccgacnnnnnncaaccttcccattacccaaaaacaacgatcggatacgcatgaggct

SEQ ID NO: 2447 - DNA, 146 bp, Artificial Sequence
  Bisulfite Padlock Probe
  misc_feature 95, 96, 97, 98, 99, 100: n = A,T,C or G
gactggaagagcactgttaccaacgcgaaaactaaaactaaaacgcgttggaggctcatcgttcctattcaggcagatgttatcgaggtccgacnnnnnncaaccttcccattacccaaaaacaacgatcggatacgcatgaggct

SEQ ID NO: 2448 - DNA, 146 bp, Artificial Sequence
  Bisulfite Padlock Probe
  misc_feature 96, 97, 98, 99, 100, 101: n = A,T,C or G
gactggaagagcactgttaccaacttaaaacgcaatatacacaaaaagttggaggctcatcgttcctattcaggcagatgttatcgaggtccgacnnnnnnaccccaacctaaaactccacaaaccgatcggatacgcatgaggct

SEQ ID NO: 2449 - DNA, 146 bp, Artificial Sequence
  Bisulfite Padlock Probe
  misc_feature 96, 97, 98, 99, 100, 101: n = A,T,C or G
gactggaagagcactgttaccaacttaaaacgcaatatacgcaaaaagttggaggctcatcgttcctattcaggcagatgttatcgaggtccgacnnnnnnaccccaacctaaaactccacaaaccgatcggatacgcatgaggct

SEQ ID NO: 2450 - DNA, 146 bp, Artificial Sequence
  Bisulfite Padlock Probe
  misc_feature 95, 96, 97, 98, 99, 100: n = A,T,C or G
gactggaagagcactgttaccaacttaccatatattactaaaactagttggaggctcatcgttcctattcaggcagatgttatcgaggtccgacnnnnnnactataaacgacgaactcacccttaagatcggatacgcatgaggct

SEQ ID NO: 2451 - DNA, 146 bp, Artificial Sequence
  Bisulfite Padlock Probe
  misc_feature 95, 96, 97, 98, 99, 100: n = A,T,C or G
gactggaagagcactgttaccaacttaccatatattactaaaactagttggaggctcatcgttcctattcaggcagatgttatcgaggtccgacnnnnnnactataaacgacgaactcgcccttaagatcggatacgcatgaggct

SEQ ID NO: 2452 - DNA, 146 bp, Artificial Sequence
  Bisulfite Padlock Probe
  misc_feature 93, 94, 95, 96, 97, 98: n = A,T,C or G
gactggaagagcactgttaccaataccacccctataacaaaaacgttggaggctcatcgttcctattcaggcagatgttatcgaggtccgacnnnnnnaactactcaaccacctacaaacccacacgatcggatacgcatgaggct

SEQ ID NO: 2453 - DNA, 146 bp, Artificial Sequence
  Bisulfite Padlock Probe
  misc_feature 92, 93, 94, 95, 96, 97: n = A,T,C or G
gactggaagagcactgttaccacaaatacaacacaaaaatcaagttggaggctcatcgttcctattcaggcagatgttatcgaggtccgacnnnnnncttaccctaaactccaaaaattaccaattgatcggatacgcatgaggct

SEQ ID NO: 2454 - DNA, 146 bp, Artificial Sequence
  Bisulfite Padlock Probe
  misc_feature 92, 93, 94, 95, 96, 97: n = A,T,C or G
gactggaagagcactgttaccacaaatacgacacaaaaatcaagttggaggctcatcgttcctattcaggcagatgttatcgaggtccgacnnnnnncttaccctaaactccgaaaattaccaattgatcggatacgcatgaggct

SEQ ID NO: 2455 - DNA, 146 bp, Artificial Sequence
  Bisulfite Padlock Probe
  misc_feature 94, 95, 96, 97, 98, 99: n = A,T,C or G
gactggaagagcactgttaccacaaccaaataaaacccctatcccgttggaggctcatcgttcctattcaggcagatgttatcgaggtccgacnnnnnntaaataaaccgcaataatctcacttacgatcggatacgcatgaggct

SEQ ID NO: 2456 - DNA, 146 bp, Artificial Sequence
  Bisulfite Padlock Probe
  misc_feature 92, 93, 94, 95, 96, 97: n = A,T,C or G
gactggaagagcactgttaccacatttccaaaccccttaaaccgttggaggctcatcgttcctattcaggcagatgttatcgaggtccgacnnnnnnctaactctatccacgtaacaaatactaaagatcggatacgcatgaggct

SEQ ID NO: 2457 - DNA, 146 bp, Artificial Sequence
  Bisulfite Padlock Probe
  misc_feature 92, 93, 94, 95, 96, 97: n = A,T,C or G
gactggaagagcactgttaccacatttccaaaccccttaaaccgttggaggctcatcgttcctattcaggcagatgttatcgaggtccgacnnnnnnctaactctatccacgtaacgaatactaaagatcggatacgcatgaggct

SEQ ID NO: 2458 - DNA, 146 bp, Artificial Sequence
  Bisulfite Padlock Probe
  misc_feature 92, 93, 94, 95, 96, 97: n = A,T,C or G
gactggaagagcactgttaccaccaaataaaaccgcaaaaccagttggaggctcatcgttcctattcaggcagatgttatcgaggtccgacnnnnnncccccaatccaacctaactcaattaaacagatcggatacgcatgaggct

SEQ ID NO: 2459 - DNA, 146 bp, Artificial Sequence
  Bisulfite Padlock Probe
  misc_feature 92, 93, 94, 95, 96, 97: n = A,T,C or G
gactggaagagcactgttaccaccaaataaaaccgcaaaaccggttggaggctcatcgttcctattcaggcagatgttatcgaggtccgacnnnnnncccccaatccaacctaactcaattaaacagatcggatacgcatgaggct

SEQ ID NO: 2460 - DNA, 146 bp, Artificial Sequence
  Bisulfite Padlock Probe
  misc_feature 92, 93, 94, 95, 96, 97: n = A,T,C or G
gactggaagagcactgttaccaccataccaaacctccttacccgttggaggctcatcgttcctattcaggcagatgttatcgaggtccgacnnnnnntaaattaaatccctacatatataatatttgatcggatacgcatgaggct

SEQ ID NO: 2461 - DNA, 146 bp, Artificial Sequence
  Bisulfite Padlock Probe
  misc_feature 92, 93, 94, 95, 96, 97: n = A,T,C or G
gactggaagagcactgttaccaccataccaaacctccttacccgttggaggctcatcgttcctattcaggcagatgttatcgaggtccgacnnnnnntaaattaaatccctacgtatataatatttgatcggatacgcatgaggct

SEQ ID NO: 2462 - DNA, 146 bp, Artificial Sequence
  Bisulfite Padlock Probe
  misc_feature 93, 94, 95, 96, 97, 98: n = A,T,C or G
gactggaagagcactgttaccacccaatctcaacataactccccgttggaggctcatcgttcctattcaggcagatgttatcgaggtccgacnnnnnncacccacccaacctaaaaaccacacttagatcggatacgcatgaggct

SEQ ID NO: 2463 - DNA, 146 bp, Artificial Sequence
  Bisulfite Padlock Probe
  misc_feature 95, 96, 97, 98, 99, 100: n = A,T,C or G
gactggaagagcactgttaccacccgaaaaatacgtatacccaaacgttggaggctcatcgttcctattcaggcagatgttatcgaggtccgacnnnnnnaaaacaaaaacgaccgtaaactcaccgatcggatacgcatgaggct

SEQ ID NO: 2464 - DNA, 146 bp, Artificial Sequence
  Bisulfite Padlock Probe
  misc_feature 95, 96, 97, 98, 99, 100: n = A,T,C or G
gactggaagagcactgttaccacccgaaaaatacgtatacccgaacgttggaggctcatcgttcctattcaggcagatgttatcgaggtccgacnnnnnnaaaacaaaaacgaccgtaaactcgccgatcggatacgcatgaggct

SEQ ID NO: 2465 - DNA, 146 bp, Artificial Sequence
  Bisulfite Padlock Probe
  misc_feature 93, 94, 95, 96, 97, 98: n = A,T,C or G
gactggaagagcactgttaccacccgacatactaacatactaacgttggaggctcatcgttcctattcaggcagatgttatcgaggtccgacnnnnnnactccgccactctccaaatctataaccagatcggatacgcatgaggct

SEQ ID NO: 2466 - DNA, 146 bp, Artificial Sequence
  Bisulfite Padlock Probe
  misc_feature 93, 94, 95, 96, 97, 98: n = A,T,C or G
gactggaagagcactgttaccacccgacatactaacgtactaacgttggaggctcatcgttcctattcaggcagatgttatcgaggtccgacnnnnnnactccgccgctctccaaatctataaccagatcggatacgcatgaggct

SEQ ID NO: 2467 - DNA, 146 bp, Artificial Sequence
  Bisulfite Padlock Probe
  misc_feature 93, 94, 95, 96, 97, 98: n = A,T,C or G
gactggaagagcactgttaccacccgatctcaacataactccccgttggaggctcatcgttcctattcaggcagatgttatcgaggtccgacnnnnnncacccgcccaacctaaaaaccacacttagatcggatacgcatgaggct

SEQ ID NO: 2468 - DNA, 146 bp, Artificial Sequence
  Bisulfite Padlock Probe
  misc_feature 92, 93, 94, 95, 96, 97: n = A,T,C or G
gactggaagagcactgttaccacgaaacaaaaacaaccctaacgttggaggctcatcgttcctattcaggcagatgttatcgaggtccgacnnnnnntataaacgaaaccaaaaaacttaacccccgatcggatacgcatgaggct

SEQ ID NO: 2469 - DNA, 146 bp, Artificial Sequence
  Bisulfite Padlock Probe
  misc_feature 92, 93, 94, 95, 96, 97: n = A,T,C or G
gactggaagagcactgttaccacgaaacgaaaacaaccctaacgttggaggctcatcgttcctattcaggcagatgttatcgaggtccgacnnnnnntataaacgaaaccgaaaaacttaacccccgatcggatacgcatgaggct

SEQ ID NO: 2470 - DNA, 146 bp, Artificial Sequence
  Bisulfite Padlock Probe
  misc_feature 94, 95, 96, 97, 98, 99: n = A,T,C or G
gactggaagagcactgttaccacgaccaaataaaacccctatcccgttggaggctcatcgttcctattcaggcagatgttatcgaggtccgacnnnnnntaaataaaccgcgataatctcacttacgatcggatacgcatgaggct

SEQ ID NO: 2471 - DNA, 146 bp, Artificial Sequence
  Bisulfite Padlock Probe
  misc_feature 96, 97, 98, 99, 100, 101: n = A,T,C or G
gactggaagagcactgttaccactaaatcgcaacgcgatacaactacgttggaggctcatcgttcctattcaggcagatgttatcgaggtccgacnnnnnnaaaacttactctaccactacctatcgatcggatacgcatgaggct

SEQ ID NO: 2472 - DNA, 146 bp, Artificial Sequence
  Bisulfite Padlock Probe
  misc_feature 96, 97, 98, 99, 100, 101: n = A,T,C or G
gactggaagagcactgttaccactaaatcgcaacgcgatacgactacgttggaggctcatcgttcctattcaggcagatgttatcgaggtccgacnnnnnnaaaacttactctaccactacctatcgatcggatacgcatgaggct

SEQ ID NO: 2473 - DNA, 146 bp, Artificial Sequence
  Bisulfite Padlock Probe
  misc_feature 93, 94, 95, 96, 97, 98: n = A,T,C or G
gactggaagagcactgttaccactatctaaaaatcatctccctcgttggaggctcatcgttcctattcaggcagatgttatcgaggtccgacnnnnnnctacacccaaacacactacttcaacctagatcggatacgcatgaggct

SEQ ID NO: 2474 - DNA, 146 bp, Artificial Sequence
  Bisulfite Padlock Probe
  misc_feature 93, 94, 95, 96, 97, 98: n = A,T,C or G
gactggaagagcactgttaccactatctaaaaatcgtctccctcgttggaggctcatcgttcctattcaggcagatgttatcgaggtccgacnnnnnnctacacccaaacacactacttcaacctagatcggatacgcatgaggct

SEQ ID NO: 2475 - DNA, 146 bp, Artificial Sequence
  Bisulfite Padlock Probe
  misc_feature 93, 94, 95, 96, 97, 98: n = A,T,C or G
gactggaagagcactgttaccacttaaccctaatactttccaacgttggaggctcatcgttcctattcaggcagatgttatcgaggtccgacnnnnnntcaacaaactaaaataaataacaaaatcgatcggatacgcatgaggct

SEQ ID NO: 2476 - DNA, 146 bp, Artificial Sequence
  Bisulfite Padlock Probe
  misc_feature 93, 94, 95, 96, 97, 98: n = A,T,C or G
gactggaagagcactgttaccataaaactccaaactacccctcagttggaggctcatcgttcctattcaggcagatgttatcgaggtccgacnnnnnnaaaaaccttaacgaaactaaacaaaaccgatcggatacgcatgaggct

SEQ ID NO: 2477 - DNA, 146 bp, Artificial Sequence
  Bisulfite Padlock Probe
  misc_feature 93, 94, 95, 96, 97, 98: n = A,T,C or G
gactggaagagcactgttaccataaaactccgaactacccctcagttggaggctcatcgttcctattcaggcagatgttatcgaggtccgacnnnnnnaaaaaccttaacgaaactaaacgaaaccgatcggatacgcatgaggct

SEQ ID NO: 2478 - DNA, 146 bp, Artificial Sequence
  Bisulfite Padlock Probe
  misc_feature 92, 93, 94, 95, 96, 97: n = A,T,C or G
gactggaagagcactgttaccataaataaacaaacctacacccgttggaggctcatcgttcctattcaggcagatgttatcgaggtccgacnnnnnntcctcaaaaaccgacaaaacaaactcctcgatcggatacgcatgaggct

SEQ ID NO: 2479 - DNA, 146 bp, Artificial Sequence
  Bisulfite Padlock Probe
  misc_feature 96, 97, 98, 99, 100, 101: n = A,T,C or G
gactggaagagcactgttaccataacaaactcgaaaacatcctaaccgttggaggctcatcgttcctattcaggcagatgttatcgaggtccgacnnnnnnaatccccaccgtcctataaacaaccgatcggatacgcatgaggct

SEQ ID NO: 2480 - DNA, 146 bp, Artificial Sequence
  Bisulfite Padlock Probe
  misc_feature 96, 97, 98, 99, 100, 101: n = A,T,C or G
gactggaagagcactgttaccataacaaactcgaaaacgtcctaaccgttggaggctcatcgttcctattcaggcagatgttatcgaggtccgacnnnnnnaatccccaccgtcctataaacgaccgatcggatacgcatgaggct

SEQ ID NO: 2481 - DNA, 146 bp, Artificial Sequence
  Bisulfite Padlock Probe
  misc_feature 94, 95, 96, 97, 98, 99: n = A,T,C or G
gactggaagagcactgttaccataacactctacaaccccatccccgttggaggctcatcgttcctattcaggcagatgttatcgaggtccgacnnnnnnaacgaaataccgacccgctacaaaaaagatcggatacgcatgaggct

SEQ ID NO: 2482 - DNA, 146 bp, Artificial Sequence
  Bisulfite Padlock Probe
  misc_feature 94, 95, 96, 97, 98, 99: n = A,T,C or G
gactggaagagcactgttaccataacactctacaaccccatccccgttggaggctcatcgttcctattcaggcagatgttatcgaggtccgacnnnnnnaacgaaataccgacccgctacgaaaaagatcggatacgcatgaggct

SEQ ID NO: 2483 - DNA, 146 bp, Artificial Sequence
  Bisulfite Padlock Probe
  misc_feature 94, 95, 96, 97, 98, 99: n = A,T,C or G
gactggaagagcactgttaccataaccaaacactccaaaaaccccgttggaggctcatcgttcctattcaggcagatgttatcgaggtccgacnnnnnnaaaccgaacgctaaaaccccaaattctgatcggatacgcatgaggct

SEQ ID NO: 2484 - DNA, 146 bp, Artificial Sequence
  Bisulfite Padlock Probe
  misc_feature 94, 95, 96, 97, 98, 99: n = A,T,C or G
gactggaagagcactgttaccataaccaaacgctccaaaaaccccgttggaggctcatcgttcctattcaggcagatgttatcgaggtccgacnnnnnnaaaccgaacgctaaaaccccgaattctgatcggatacgcatgaggct

SEQ ID NO: 2485 - DNA, 146 bp, Artificial Sequence
  Bisulfite Padlock Probe
  misc_feature 93, 94, 95, 96, 97, 98: n = A,T,C or G
gactggaagagcactgttaccataactaacgcgcaacccaacaagttggaggctcatcgttcctattcaggcagatgttatcgaggtccgacnnnnnnctcgaacgccttaaaacaaacgaaccacgatcggatacgcatgaggct

SEQ ID NO: 2486 - DNA, 146 bp, Artificial Sequence
  Bisulfite Padlock Probe
  misc_feature 93, 94, 95, 96, 97, 98: n = A,T,C or G
gactggaagagcactgttaccataactaacgcgcaacccgacaagttggaggctcatcgttcctattcaggcagatgttatcgaggtccgacnnnnnnctcgaacgccttaaaacaaacgaaccgcgatcggatacgcatgaggct

SEQ ID NO: 2487 - DNA, 146 bp, Artificial Sequence
  Bisulfite Padlock Probe
  misc_feature 96, 97, 98, 99, 100, 101: n = A,T,C or G
gactggaagagcactgttaccataatataaataacaatactaataacgttggaggctcatcgttcctattcaggcagatgttatcgaggtccgacnnnnnnaatctacccacatactaataccatcgatcggatacgcatgaggct

SEQ ID NO: 2488 - DNA, 146 bp, Artificial Sequence
  Bisulfite Padlock Probe
  misc_feature 94, 95, 96, 97, 98, 99: n = A,T,C or G
gactggaagagcactgttaccatcaaccctatacaacccaaaaaagttggaggctcatcgttcctattcaggcagatgttatcgaggtccgacnnnnnnaaaccgacacaatacaactactactctgatcggatacgcatgaggct

SEQ ID NO: 2489 - DNA, 146 bp, Artificial Sequence
  Bisulfite Padlock Probe
  misc_feature 94, 95, 96, 97, 98, 99: n = A,T,C or G
gactggaagagcactgttaccatcaaccctatacaacccgaaaaagttggaggctcatcgttcctattcaggcagatgttatcgaggtccgacnnnnnnaaaccgacgcaatacaactactactctgatcggatacgcatgaggct

SEQ ID NO: 2490 - DNA, 146 bp, Artificial Sequence
  Bisulfite Padlock Probe
  misc_feature 94, 95, 96, 97, 98, 99: n = A,T,C or G
gactggaagagcactgttacccaaaaacttcaacaacatcaaaaagttggaggctcatcgttcctattcaggcagatgttatcgaggtccgacnnnnnnaaaatttcaacaacgcactctaacatcgatcggatacgcatgaggct

SEQ ID NO: 2491 - DNA, 146 bp, Artificial Sequence
  Bisulfite Padlock Probe
  misc_feature 94, 95, 96, 97, 98, 99: n = A,T,C or G
gactggaagagcactgttacccaaaaacttcaacaacatcaaaaagttggaggctcatcgttcctattcaggcagatgttatcgaggtccgacnnnnnnaaaatttcaacaacgcactctaacgtcgatcggatacgcatgaggct

SEQ ID NO: 2492 - DNA, 146 bp, Artificial Sequence
  Bisulfite Padlock Probe
  misc_feature 96, 97, 98, 99, 100, 101: n = A,T,C or G
gactggaagagcactgttacccaaaataaacgctaacaacccaaaccgttggaggctcatcgttcctattcaggcagatgttatcgaggtccgacnnnnnnaaaccgaaaaataaacaactaaaaagatcggatacgcatgaggct

SEQ ID NO: 2493 - DNA, 146 bp, Artificial Sequence
  Bisulfite Padlock Probe
  misc_feature 96, 97, 98, 99, 100, 101: n = A,T,C or G
gactggaagagcactgttacccaaaataaacgctaacaacccgaaccgttggaggctcatcgttcctattcaggcagatgttatcgaggtccgacnnnnnnaaaccgaaaaataaacgactaaaaagatcggatacgcatgaggct

SEQ ID NO: 2494 - DNA, 146 bp, Artificial Sequence
  Bisulfite Padlock Probe
  misc_feature 94, 95, 96, 97, 98, 99: n = A,T,C or G
gactggaagagcactgttacccaaaataacgacaacccaaccaacgttggaggctcatcgttcctattcaggcagatgttatcgaggtccgacnnnnnnaaaaactcgaaaacccaaaaattcaacgatcggatacgcatgaggct

SEQ ID NO: 2495 - DNA, 146 bp, Artificial Sequence
  Bisulfite Padlock Probe
  misc_feature 94, 95, 96, 97, 98, 99: n = A,T,C or G
gactggaagagcactgttacccaaaataacgacaacccgaccaacgttggaggctcatcgttcctattcaggcagatgttatcgaggtccgacnnnnnnaaaaactcgaaaacccaaaaattcgacgatcggatacgcatgaggct

SEQ ID NO: 2496 - DNA, 146 bp, Artificial Sequence
  Bisulfite Padlock Probe
  misc_feature 92, 93, 94, 95, 96, 97: n = A,T,C or G
gactggaagagcactgttacccaaaattaacccaaaaaaccctgttggaggctcatcgttcctattcaggcagatgttatcgaggtccgacnnnnnnctcctctccccaacacactaatatttctagatcggatacgcatgaggct

SEQ ID NO: 2497 - DNA, 146 bp, Artificial Sequence
  Bisulfite Padlock Probe
  misc_feature 92, 93, 94, 95, 96, 97: n = A,T,C or G
gactggaagagcactgttacccaaaattaacccgaaaaaccctgttggaggctcatcgttcctattcaggcagatgttatcgaggtccgacnnnnnnctcctctccccaacgcactaatatttctagatcggatacgcatgaggct

SEQ ID NO: 2498 - DNA, 146 bp, Artificial Sequence
  Bisulfite Padlock Probe
  misc_feature 93, 94, 95, 96, 97, 98: n = A,T,C or G
gactggaagagcactgttacccaaaattccctcctaccaatatagttggaggctcatcgttcctattcaggcagatgttatcgaggtccgacnnnnnnaaccgaacgcttaaaaacccaatttcccgatcggatacgcatgaggct

SEQ ID NO: 2499 - DNA, 146 bp, Artificial Sequence
  Bisulfite Padlock Probe
  misc_feature 93, 94, 95, 96, 97, 98: n = A,T,C or G
gactggaagagcactgttacccaaaattccctcctaccaatatagttggaggctcatcgttcctattcaggcagatgttatcgaggtccgacnnnnnnaaccgaacgcttaaaaacccgatttcccgatcggatacgcatgaggct

SEQ ID NO: 2500 - DNA, 146 bp, Artificial Sequence
  Bisulfite Padlock Probe
  misc_feature 92, 93, 94, 95, 96, 97: n = A,T,C or G
gactggaagagcactgttacccaaaccccaccactctcaaaacgttggaggctcatcgttcctattcaggcagatgttatcgaggtccgacnnnnnntacccaaccccataataatcacaaccaccgatcggatacgcatgaggct

SEQ ID NO: 2501 - DNA, 146 bp, Artificial Sequence
  Bisulfite Padlock Probe
  misc_feature 95, 96, 97, 98, 99, 100: n = A,T,C or G
gactggaagagcactgttacccaaaccgaactaaccaacaacaaacgttggaggctcatcgttcctattcaggcagatgttatcgaggtccgacnnnnnnaaaacccaaaacgaccccgacaaaaagatcggatacgcatgaggct

SEQ ID NO: 2502 - DNA, 146 bp, Artificial Sequence
  Bisulfite Padlock Probe
  misc_feature 95, 96, 97, 98, 99, 100: n = A,T,C or G
gactggaagagcactgttacccaaaccgaactaaccaacgacaaacgttggaggctcatcgttcctattcaggcagatgttatcgaggtccgacnnnnnnaaaacccaaaacgaccccgacgaaaagatcggatacgcatgaggct

SEQ ID NO: 2503 - DNA, 146 bp, Artificial Sequence
  Bisulfite Padlock Probe
  misc_feature 93, 94, 95, 96, 97, 98: n = A,T,C or G
gactggaagagcactgttacccaaacctacttcttcctaaactcgttggaggctcatcgttcctattcaggcagatgttatcgaggtccgacnnnnnnaaccccgaacttaataccaaatccaaacgatcggatacgcatgaggct

SEQ ID NO: 2504 - DNA, 146 bp, Artificial Sequence
  Bisulfite Padlock Probe
  misc_feature 93, 94, 95, 96, 97, 98: n = A,T,C or G
gactggaagagcactgttacccaaacctacttcttcctaaactcgttggaggctcatcgttcctattcaggcagatgttatcgaggtccgacnnnnnnaaccccgaacttaataccgaatccaaacgatcggatacgcatgaggct

SEQ ID NO: 2505 - DNA, 146 bp, Artificial Sequence
  Bisulfite Padlock Probe
  misc_feature 93, 94, 95, 96, 97, 98: n = A,T,C or G
gactggaagagcactgttacccaaactaattttcccaaaccaacgttggaggctcatcgttcctattcaggcagatgttatcgaggtccgacnnnnnnaaataaaaccaacaataaaaataacatcgatcggatacgcatgaggct

SEQ ID NO: 2506 - DNA, 146 bp, Artificial Sequence
  Bisulfite Padlock Probe
  misc_feature 93, 94, 95, 96, 97, 98: n = A,T,C or G
gactggaagagcactgttacccaaactaattttcccgaaccaacgttggaggctcatcgttcctattcaggcagatgttatcgaggtccgacnnnnnnaaataaaaccgacaataaaaataacatcgatcggatacgcatgaggct

SEQ ID NO: 2507 - DNA, 146 bp, Artificial Sequence
  Bisulfite Padlock Probe
  misc_feature 96, 97, 98, 99, 100, 101: n = A,T,C or G
gactggaagagcactgttacccaaactatacccaaccgaatccaaacgttggaggctcatcgttcctattcaggcagatgttatcgaggtccgacnnnnnnaaaaactccctctcatcacctctccgatcggatacgcatgaggct

SEQ ID NO: 2508 - DNA, 146 bp, Artificial Sequence
  Bisulfite Padlock Probe
  misc_feature 96, 97, 98, 99, 100, 101: n = A,T,C or G
gactggaagagcactgttacccaaactatacccaaccgaatccgaacgttggaggctcatcgttcctattcaggcagatgttatcgaggtccgacnnnnnnaaaaactccctctcatcgcctctccgatcggatacgcatgaggct

SEQ ID NO: 2509 - DNA, 146 bp, Artificial Sequence
  Bisulfite Padlock Probe
  misc_feature 94, 95, 96, 97, 98, 99: n = A,T,C or G
gactggaagagcactgttacccaaatctaacctctaaataaccacgttggaggctcatcgttcctattcaggcagatgttatcgaggtccgacnnnnnncacgacaaaaccacaaacccccaaaaagatcggatacgcatgaggct

SEQ ID NO: 2510 - DNA, 146 bp, Artificial Sequence
  Bisulfite Padlock Probe
  misc_feature 96, 97, 98, 99, 100, 101: n = A,T,C or G
gactggaagagcactgttacccaacaaaactaacaaaaatctcccttgttggaggctcatcgttcctattcaggcagatgttatcgaggtccgacnnnnnnaaaaacgaactcctccaaacttctcgatcggatacgcatgaggct

SEQ ID NO: 2511 - DNA, 146 bp, Artificial Sequence
  Bisulfite Padlock Probe
  misc_feature 95, 96, 97, 98, 99, 100: n = A,T,C or G
gactggaagagcactgttacccaacaaaataactctcacatcttttgttggaggctcatcgttcctattcaggcagatgttatcgaggtccgacnnnnnnaaaataaaaacgaaacgaaaatcaacgatcggatacgcatgaggct

SEQ ID NO: 2512 - DNA, 146 bp, Artificial Sequence
  Bisulfite Padlock Probe
  misc_feature 95, 96, 97, 98, 99, 100: n = A,T,C or G
gactggaagagcactgttacccaacaaaataactctcgcatcttttgttggaggctcatcgttcctattcaggcagatgttatcgaggtccgacnnnnnnaaaataaaaacgaaacgaaaatcgacgatcggatacgcatgaggct

SEQ ID NO: 2513 - DNA, 146 bp, Artificial Sequence
  Bisulfite Padlock Probe
  misc_feature 92, 93, 94, 95, 96, 97: n = A,T,C or G
gactggaagagcactgttacccaacctccgctacactaacaacgttggaggctcatcgttcctattcaggcagatgttatcgaggtccgacnnnnnnaaaacaacgccacaacgaacctctacaaagatcggatacgcatgaggct

SEQ ID NO: 2514 - DNA, 146 bp, Artificial Sequence
  Bisulfite Padlock Probe
  misc_feature 92, 93, 94, 95, 96, 97: n = A,T,C or G
gactggaagagcactgttacccaacctccgctacgctaacaacgttggaggctcatcgttcctattcaggcagatgttatcgaggtccgacnnnnnnaaaacaacgccacaacgaacctctacgaagatcggatacgcatgaggct

SEQ ID NO: 2515 - DNA, 146 bp, Artificial Sequence
  Bisulfite Padlock Probe
  misc_feature 96, 97, 98, 99, 100, 101: n = A,T,C or G
gactggaagagcactgttacccaacgaaactaacaaaaatctcccttgttggaggctcatcgttcctattcaggcagatgttatcgaggtccgacnnnnnnaaaaacgaactcctccgaacttctcgatcggatacgcatgaggct

SEQ ID NO: 2516 - DNA, 146 bp, Artificial Sequence
  Bisulfite Padlock Probe
  misc_feature 93, 94, 95, 96, 97, 98: n = A,T,C or G
gactggaagagcactgttacccaacgcgaaaaacgaaacaaaccgttggaggctcatcgttcctattcaggcagatgttatcgaggtccgacnnnnnnaaactaaccaactaccccaaaaccacccgatcggatacgcatgaggct

SEQ ID NO: 2517 - DNA, 146 bp, Artificial Sequence
  Bisulfite Padlock Probe
  misc_feature 93, 94, 95, 96, 97, 98: n = A,T,C or G
gactggaagagcactgttacccaacgcgaaaaacgaaacgaaccgttggaggctcatcgttcctattcaggcagatgttatcgaggtccgacnnnnnnaaactaaccaactaccccgaaaccacccgatcggatacgcatgaggct

SEQ ID NO: 2518 - DNA, 146 bp, Artificial Sequence
  Bisulfite Padlock Probe
  misc_feature 93, 94, 95, 96, 97, 98: n = A,T,C or G
gactggaagagcactgttacccaatcccgaccaaaacccttaacgttggaggctcatcgttcctattcaggcagatgttatcgaggtccgacnnnnnnaatccccgaacgcactaaactaactaaagatcggatacgcatgaggct

SEQ ID NO: 2519 - DNA, 146 bp, Artificial Sequence
  Bisulfite Padlock Probe
  misc_feature 93, 94, 95, 96, 97, 98: n = A,T,C or G
gactggaagagcactgttacccaatcccgaccgaaacccttaacgttggaggctcatcgttcctattcaggcagatgttatcgaggtccgacnnnnnnaatccccgaacgcgctaaactaactaaagatcggatacgcatgaggct

SEQ ID NO: 2520 - DNA, 146 bp, Artificial Sequence
  Bisulfite Padlock Probe
  misc_feature 94, 95, 96, 97, 98, 99: n = A,T,C or G
gactggaagagcactgttacccacaaattacgaacaaataattaagttggaggctcatcgttcctattcaggcagatgttatcgaggtccgacnnnnnnatatccatatatacatatatatatacagatcggatacgcatgaggct

SEQ ID NO: 2521 - DNA, 146 bp, Artificial Sequence
  Bisulfite Padlock Probe
  misc_feature 94, 95, 96, 97, 98, 99: n = A,T,C or G
gactggaagagcactgttacccacaaattacgaacgaataattaagttggaggctcatcgttcctattcaggcagatgttatcgaggtccgacnnnnnnatatccatatatacatatatatatacggatcggatacgcatgaggct

SEQ ID NO: 2522 - DNA, 146 bp, Artificial Sequence
  Bisulfite Padlock Probe
  misc_feature 92, 93, 94, 95, 96, 97: n = A,T,C or G
gactggaagagcactgttacccacataaacatactctataaacgttggaggctcatcgttcctattcaggcagatgttatcgaggtccgacnnnnnnaaacacgaacacgaaaactaactaacatagatcggatacgcatgaggct

SEQ ID NO: 2523 - DNA, 146 bp, Artificial Sequence
  Bisulfite Padlock Probe
  misc_feature 92, 93, 94, 95, 96, 97: n = A,T,C or G
gactggaagagcactgttacccacataaacatactctataaacgttggaggctcatcgttcctattcaggcagatgttatcgaggtccgacnnnnnnaaacacgaacacgaaaactaactaacgtagatcggatacgcatgaggct

SEQ ID NO: 2524 - DNA, 146 bp, Artificial Sequence
  Bisulfite Padlock Probe
  misc_feature 92, 93, 94, 95, 96, 97: n = A,T,C or G
gactggaagagcactgttacccaccaacaaattaaaaatatccgttggaggctcatcgttcctattcaggcagatgttatcgaggtccgacnnnnnnattttacctattttaccactatttaaaaagatcggatacgcatgaggct

SEQ ID NO: 2525 - DNA, 146 bp, Artificial Sequence
  Bisulfite Padlock Probe
  misc_feature 92, 93, 94, 95, 96, 97: n = A,T,C or G
gactggaagagcactgttacccaccaaccgctatcactaaaccgttggaggctcatcgttcctattcaggcagatgttatcgaggtccgacnnnnnnttcaacatcaaaaacatcataaataaaaagatcggatacgcatgaggct

SEQ ID NO: 2526 - DNA, 146 bp, Artificial Sequence
  Bisulfite Padlock Probe
  misc_feature 92, 93, 94, 95, 96, 97: n = A,T,C or G
gactggaagagcactgttacccaccaaccgctatcgctaaaccgttggaggctcatcgttcctattcaggcagatgttatcgaggtccgacnnnnnnttcaacatcgaaaacatcataaataaaaagatcggatacgcatgaggct

SEQ ID NO: 2527 - DNA, 146 bp, Artificial Sequence
  Bisulfite Padlock Probe
  misc_feature 95, 96, 97, 98, 99, 100: n = A,T,C or G
gactggaagagcactgttacccacccacaccctccaataaaaatttgttggaggctcatcgttcctattcaggcagatgttatcgaggtccgacnnnnnnaaaaaccccgcgccaaccaaaataaagatcggatacgcatgaggct

SEQ ID NO: 2528 - DNA, 146 bp, Artificial Sequence
  Bisulfite Padlock Probe
  misc_feature 95, 96, 97, 98, 99, 100: n = A,T,C or G
gactggaagagcactgttacccacccgcaccctccaataaaaatttgttggaggctcatcgttcctattcaggcagatgttatcgaggtccgacnnnnnnaaaaaccccgcgccgaccaaaataaagatcggatacgcatgaggct

SEQ ID NO: 2529 - DNA, 146 bp, Artificial Sequence
  Bisulfite Padlock Probe
  misc_feature 92, 93, 94, 95, 96, 97: n = A,T,C or G
gactggaagagcactgttacccaccctacaacccaaccaaaaagttggaggctcatcgttcctattcaggcagatgttatcgaggtccgacnnnnnnaacgtaaaatactcaacttatacctaaaagatcggatacgcatgaggct

SEQ ID NO: 2530 - DNA, 146 bp, Artificial Sequence
  Bisulfite Padlock Probe
  misc_feature 92, 93, 94, 95, 96, 97: n = A,T,C or G
gactggaagagcactgttacccaccctacaacccaaccaaaaagttggaggctcatcgttcctattcaggcagatgttatcgaggtccgacnnnnnnaacgtaaaatactcgacttatacctaaaagatcggatacgcatgaggct

SEQ ID NO: 2531 - DNA, 146 bp, Artificial Sequence
  Bisulfite Padlock Probe
  misc_feature 92, 93, 94, 95, 96, 97: n = A,T,C or G
gactggaagagcactgttacccactaactaccacccaattacagttggaggctcatcgttcctattcaggcagatgttatcgaggtccgacnnnnnnaaaacaacgacccgaaactaccgaaaacagatcggatacgcatgaggct

SEQ ID NO: 2532 - DNA, 146 bp, Artificial Sequence
  Bisulfite Padlock Probe
  misc_feature 92, 93, 94, 95, 96, 97: n = A,T,C or G
gactggaagagcactgttacccactaactaccacccaattacagttggaggctcatcgttcctattcaggcagatgttatcgaggtccgacnnnnnnaaaacaacgacccgaaactaccgaaaacggatcggatacgcatgaggct

SEQ ID NO: 2533 - DNA, 146 bp, Artificial Sequence
  Bisulfite Padlock Probe
  misc_feature 94, 95, 96, 97, 98, 99: n = A,T,C or G
gactggaagagcactgttacccactataatttttcccccaaaatcgttggaggctcatcgttcctattcaggcagatgttatcgaggtccgacnnnnnnaaaaacgcaaatctcaaattaactaccgatcggatacgcatgaggct

SEQ ID NO: 2534 - DNA, 146 bp, Artificial Sequence
  Bisulfite Padlock Probe
  misc_feature 93, 94, 95, 96, 97, 98: n = A,T,C or G
gactggaagagcactgttacccactccactctactccactctttgttggaggctcatcgttcctattcaggcagatgttatcgaggtccgacnnnnnnacaaaaacgaatcgaactacaaactctagatcggatacgcatgaggct

SEQ ID NO: 2535 - DNA, 146 bp, Artificial Sequence
  Bisulfite Padlock Probe
  misc_feature 96, 97, 98, 99, 100, 101: n = A,T,C or G
gactggaagagcactgttacccactcccccacatctacaactaaatagttggaggctcatcgttcctattcaggcagatgttatcgaggtccgacnnnnnnccaacgcttcttacacacataatccgatcggatacgcatgaggct

SEQ ID NO: 2536 - DNA, 146 bp, Artificial Sequence
  Bisulfite Padlock Probe
  misc_feature 96, 97, 98, 99, 100, 101: n = A,T,C or G
gactggaagagcactgttacccactcccccacatctacaactaaatagttggaggctcatcgttcctattcaggcagatgttatcgaggtccgacnnnnnnccaacgcttcttacgcacataatccgatcggatacgcatgaggct

SEQ ID NO: 2537 - DNA, 146 bp, Artificial Sequence
  Bisulfite Padlock Probe
  misc_feature 93, 94, 95, 96, 97, 98: n = A,T,C or G
gactggaagagcactgttacccactccgctctactccactctttgttggaggctcatcgttcctattcaggcagatgttatcgaggtccgacnnnnnnacaaaaacgaatcgaactacgaactctagatcggatacgcatgaggct

SEQ ID NO: 2538 - DNA, 146 bp, Artificial Sequence
  Bisulfite Padlock Probe
  misc_feature 94, 95, 96, 97, 98, 99: n = A,T,C or G
gactggaagagcactgttacccatataacaacacattatctccacgttggaggctcatcgttcctattcaggcagatgttatcgaggtccgacnnnnnncttatactcctaccttaacatatactcgatcggatacgcatgaggct

SEQ ID NO: 2539 - DNA, 146 bp, Artificial Sequence
  Bisulfite Padlock Probe
  misc_feature 94, 95, 96, 97, 98, 99: n = A,T,C or G
gactggaagagcactgttacccatataacaacacgttatctccacgttggaggctcatcgttcctattcaggcagatgttatcgaggtccgacnnnnnncttatactcctaccttaacatatactcgatcggatacgcatgaggct

SEQ ID NO: 2540 - DNA, 146 bp, Artificial Sequence
  Bisulfite Padlock Probe
  misc_feature 94, 95, 96, 97, 98, 99: n = A,T,C or G
gactggaagagcactgttaccccaaaactaataaccctccccctcgttggaggctcatcgttcctattcaggcagatgttatcgaggtccgacnnnnnnaaaaacaatcaaaaatctaaaaactacgatcggatacgcatgaggct

SEQ ID NO: 2541 - DNA, 146 bp, Artificial Sequence
  Bisulfite Padlock Probe
  misc_feature 94, 95, 96, 97, 98, 99: n = A,T,C or G
gactggaagagcactgttaccccaaaactaataaccctccccctcgttggaggctcatcgttcctattcaggcagatgttatcgaggtccgacnnnnnnaaaaacgatcaaaaatctaaaaactacgatcggatacgcatgaggct

SEQ ID NO: 2542 - DNA, 146 bp, Artificial Sequence
  Bisulfite Padlock Probe
  misc_feature 92, 93, 94, 95, 96, 97: n = A,T,C or G
gactggaagagcactgttaccccaaacctaaaactacaactcagttggaggctcatcgttcctattcaggcagatgttatcgaggtccgacnnnnnnaacaaccccaaaaacaacaacaacaacacgatcggatacgcatgaggct

SEQ ID NO: 2543 - DNA, 146 bp, Artificial Sequence
  Bisulfite Padlock Probe
  misc_feature 94, 95, 96, 97, 98, 99: n = A,T,C or G
gactggaagagcactgttaccccaaatcgcccttcaaaataaaacgttggaggctcatcgttcctattcaggcagatgttatcgaggtccgacnnnnnnaccgaacgcgaaacaaaaacaatcaccgatcggatacgcatgaggct

SEQ ID NO: 2544 - DNA, 146 bp, Artificial Sequence
  Bisulfite Padlock Probe
  misc_feature 94, 95, 96, 97, 98, 99: n = A,T,C or G
gactggaagagcactgttaccccaaatcgcccttcgaaataaaacgttggaggctcatcgttcctattcaggcagatgttatcgaggtccgacnnnnnnaccgaacgcgaaacaaaaacgatcaccgatcggatacgcatgaggct

SEQ ID NO: 2545 - DNA, 146 bp, Artificial Sequence
  Bisulfite Padlock Probe
  misc_feature 92, 93, 94, 95, 96, 97: n = A,T,C or G
gactggaagagcactgttaccccaacgaacacataataacttcgttggaggctcatcgttcctattcaggcagatgttatcgaggtccgacnnnnnnccaattaacaaataacgacatcaaaaatcgatcggatacgcatgaggct

SEQ ID NO: 2546 - DNA, 146 bp, Artificial Sequence
  Bisulfite Padlock Probe
  misc_feature 92, 93, 94, 95, 96, 97: n = A,T,C or G
gactggaagagcactgttaccccaacgaacacgtaataacttcgttggaggctcatcgttcctattcaggcagatgttatcgaggtccgacnnnnnnccaattaacaaataacgacgtcaaaaatcgatcggatacgcatgaggct

SEQ ID NO: 2547 - DNA, 146 bp, Artificial Sequence
  Bisulfite Padlock Probe
  misc_feature 92, 93, 94, 95, 96, 97: n = A,T,C or G
gactggaagagcactgttaccccaacgccctaatcctcaaaacgttggaggctcatcgttcctattcaggcagatgttatcgaggtccgacnnnnnnacccaaaattctaaaatatctaaaatctcgatcggatacgcatgaggct

SEQ ID NO: 2548 - DNA, 146 bp, Artificial Sequence
  Bisulfite Padlock Probe
  misc_feature 92, 93, 94, 95, 96, 97: n = A,T,C or G
gactggaagagcactgttaccccaacgccctaatcctcgaaacgttggaggctcatcgttcctattcaggcagatgttatcgaggtccgacnnnnnnacccgaaattctaaaatatctaaaatctcgatcggatacgcatgaggct

SEQ ID NO: 2549 - DNA, 146 bp, Artificial Sequence
  Bisulfite Padlock Probe
  misc_feature 92, 93, 94, 95, 96, 97: n = A,T,C or G
gactggaagagcactgttaccccaccgcccaccttaaataaaagttggaggctcatcgttcctattcaggcagatgttatcgaggtccgacnnnnnnaaaacgaataccgctactaactaacaaccgatcggatacgcatgaggct

SEQ ID NO: 2550 - DNA, 146 bp, Artificial Sequence
  Bisulfite Padlock Probe
  misc_feature 92, 93, 94, 95, 96, 97: n = A,T,C or G
gactggaagagcactgttaccccaccgcccgccttaaataaaagttggaggctcatcgttcctattcaggcagatgttatcgaggtccgacnnnnnnaaaacgaataccgctactaactaacgaccgatcggatacgcatgaggct

SEQ ID NO: 2551 - DNA, 146 bp, Artificial Sequence
  Bisulfite Padlock Probe
  misc_feature 94, 95, 96, 97, 98, 99: n = A,T,C or G
gactggaagagcactgttaccccatccaacccctaaaactacaacgttggaggctcatcgttcctattcaggcagatgttatcgaggtccgacnnnnnntactcaaaaccctaaacctccaattccgatcggatacgcatgaggct

SEQ ID NO: 2552 - DNA, 146 bp, Artificial Sequence
  Bisulfite Padlock Probe
  misc_feature 94, 95, 96, 97, 98, 99: n = A,T,C or G
gactggaagagcactgttaccccatccgacccctaaaactacaacgttggaggctcatcgttcctattcaggcagatgttatcgaggtccgacnnnnnntactcaaaaccctaaacctccgattccgatcggatacgcatgaggct

SEQ ID NO: 2553 - DNA, 146 bp, Artificial Sequence
  Bisulfite Padlock Probe
  misc_feature 92, 93, 94, 95, 96, 97: n = A,T,C or G
gactggaagagcactgttacccccaaaaacctaactccgaccagttggaggctcatcgttcctattcaggcagatgttatcgaggtccgacnnnnnnaaaaatattaacgctcctaaccgcccaaagatcggatacgcatgaggct

SEQ ID NO: 2554 - DNA, 146 bp, Artificial Sequence
  Bisulfite Padlock Probe
  misc_feature 92, 93, 94, 95, 96, 97: n = A,T,C or G
gactggaagagcactgttacccccaaaaacctaactccgaccggttggaggctcatcgttcctattcaggcagatgttatcgaggtccgacnnnnnnaaaaatattaacgctcctaaccgcccgaagatcggatacgcatgaggct

SEQ ID NO: 2555 - DNA, 146 bp, Artificial Sequence
  Bisulfite Padlock Probe
  misc_feature 92, 93, 94, 95, 96, 97: n = A,T,C or G
gactggaagagcactgttacccccaacttcctaaaacaaccccgttggaggctcatcgttcctattcaggcagatgttatcgaggtccgacnnnnnncccaaccccacaaaacctaaatataaaaagatcggatacgcatgaggct

SEQ ID NO: 2556 - DNA, 146 bp, Artificial Sequence
  Bisulfite Padlock Probe
  misc_feature 92, 93, 94, 95, 96, 97: n = A,T,C or G
gactggaagagcactgttacccccaacttcctaaaacaaccccgttggaggctcatcgttcctattcaggcagatgttatcgaggtccgacnnnnnncccaaccccgcaaaacctaaatataaaaagatcggatacgcatgaggct

SEQ ID NO: 2557 - DNA, 146 bp, Artificial Sequence
  Bisulfite Padlock Probe
  misc_feature 92, 93, 94, 95, 96, 97: n = A,T,C or G
gactggaagagcactgttacccccaatatcaaatatataaacagttggaggctcatcgttcctattcaggcagatgttatcgaggtccgacnnnnnnattaatataataatttcctccaattctaagatcggatacgcatgaggct

SEQ ID NO: 2558 - DNA, 146 bp, Artificial Sequence
  Bisulfite Padlock Probe
  misc_feature 92, 93, 94, 95, 96, 97: n = A,T,C or G
gactggaagagcactgttacccccatcatccctaacacctaacgttggaggctcatcgttcctattcaggcagatgttatcgaggtccgacnnnnnncaactcaaacctctaaaaaccttcctaccgatcggatacgcatgaggct

SEQ ID NO: 2559 - DNA, 146 bp, Artificial Sequence
  Bisulfite Padlock Probe
  misc_feature 92, 93, 94, 95, 96, 97: n = A,T,C or G
gactggaagagcactgttacccccatcgtccctaacacctaacgttggaggctcatcgttcctattcaggcagatgttatcgaggtccgacnnnnnncaactcaaacctctaaaaaccttcctaccgatcggatacgcatgaggct

SEQ ID NO: 2560 - DNA, 146 bp, Artificial Sequence
  Bisulfite Padlock Probe
  misc_feature 92, 93, 94, 95, 96, 97: n = A,T,C or G
gactggaagagcactgttacccccgaaacaacactaaaaacacgttggaggctcatcgttcctattcaggcagatgttatcgaggtccgacnnnnnntttccaatcttacccaacccaatatttctgatcggatacgcatgaggct

SEQ ID NO: 2561 - DNA, 146 bp, Artificial Sequence
  Bisulfite Padlock Probe
  misc_feature 92, 93, 94, 95, 96, 97: n = A,T,C or G
gactggaagagcactgttacccccgaaacaacgctaaaaacacgttggaggctcatcgttcctattcaggcagatgttatcgaggtccgacnnnnnntttccaatcttacccaacccgatatttctgatcggatacgcatgaggct

SEQ ID NO: 2562 - DNA, 146 bp, Artificial Sequence
  Bisulfite Padlock Probe
  misc_feature 93, 94, 95, 96, 97, 98: n = A,T,C or G
gactggaagagcactgttacccccgacaaacataataaacttcagttggaggctcatcgttcctattcaggcagatgttatcgaggtccgacnnnnnnaatacactatacccaaaatatctaccacgatcggatacgcatgaggct

SEQ ID NO: 2563 - DNA, 146 bp, Artificial Sequence
  Bisulfite Padlock Probe
  misc_feature 93, 94, 95, 96, 97, 98: n = A,T,C or G
gactggaagagcactgttacccccgacgaacataataaacttcagttggaggctcatcgttcctattcaggcagatgttatcgaggtccgacnnnnnnaatacgctatacccaaaatatctaccacgatcggatacgcatgaggct

SEQ ID NO: 2564 - DNA, 146 bp, Artificial Sequence
  Bisulfite Padlock Probe
  misc_feature 92, 93, 94, 95, 96, 97: n = A,T,C or G
gactggaagagcactgttacccccgatatcaaatatataaacagttggaggctcatcgttcctattcaggcagatgttatcgaggtccgacnnnnnnattaatataataatttcctccaattctaagatcggatacgcatgaggct

SEQ ID NO: 2565 - DNA, 146 bp, Artificial Sequence
  Bisulfite Padlock Probe
  misc_feature 93, 94, 95, 96, 97, 98: n = A,T,C or G
gactggaagagcactgttacccccgccctcaaaaaactttatacgttggaggctcatcgttcctattcaggcagatgttatcgaggtccgacnnnnnnaaccttctcgaaatactctcgccatcaagatcggatacgcatgaggct

SEQ ID NO: 2566 - DNA, 146 bp, Artificial Sequence
  Bisulfite Padlock Probe
  misc_feature 93, 94, 95, 96, 97, 98: n = A,T,C or G
gactggaagagcactgttacccccgccctcgaaaaactttatacgttggaggctcatcgttcctattcaggcagatgttatcgaggtccgacnnnnnnaaccttctcgaaatactctcgccgtcaagatcggatacgcatgaggct

SEQ ID NO: 2567 - DNA, 146 bp, Artificial Sequence
  Bisulfite Padlock Probe
  misc_feature 92, 93, 94, 95, 96, 97: n = A,T,C or G
gactggaagagcactgttaccccctccaaaccctaaacaaaaagttggaggctcatcgttcctattcaggcagatgttatcgaggtccgacnnnnnnctcaatccaaccctccctacaaacaactcgatcggatacgcatgaggct

SEQ ID NO: 2568 - DNA, 146 bp, Artificial Sequence
  Bisulfite Padlock Probe
  misc_feature 92, 93, 94, 95, 96, 97: n = A,T,C or G
gactggaagagcactgttaccccctccaaaccctaaacaaaaagttggaggctcatcgttcctattcaggcagatgttatcgaggtccgacnnnnnnctcaatccaaccctccctacaaacgactcgatcggatacgcatgaggct

SEQ ID NO: 2569 - DNA, 146 bp, Artificial Sequence
  Bisulfite Padlock Probe
  misc_feature 92, 93, 94, 95, 96, 97: n = A,T,C or G
gactggaagagcactgttacccccttaacaaaatcccctatccgttggaggctcatcgttcctattcaggcagatgttatcgaggtccgacnnnnnncctaaaaatccccgaaccgtacattaaacgatcggatacgcatgaggct

SEQ ID NO: 2570 - DNA, 146 bp, Artificial Sequence
  Bisulfite Padlock Probe
  misc_feature 92, 93, 94, 95, 96, 97: n = A,T,C or G
gactggaagagcactgttacccccttaacgaaatcccctatccgttggaggctcatcgttcctattcaggcagatgttatcgaggtccgacnnnnnncctaaaaatccccgaaccgtacgttaaacgatcggatacgcatgaggct

SEQ ID NO: 2571 - DNA, 146 bp, Artificial Sequence
  Bisulfite Padlock Probe
  misc_feature 92, 93, 94, 95, 96, 97: n = A,T,C or G
gactggaagagcactgttaccccgaaaccccaaaaacctatacgttggaggctcatcgttcctattcaggcagatgttatcgaggtccgacnnnnnnataaataattccaacattaaatcaaaaacgatcggatacgcatgaggct

SEQ ID NO: 2572 - DNA, 146 bp, Artificial Sequence
  Bisulfite Padlock Probe
  misc_feature 92, 93, 94, 95, 96, 97: n = A,T,C or G
gactggaagagcactgttaccccgaaaccccgaaaacctatacgttggaggctcatcgttcctattcaggcagatgttatcgaggtccgacnnnnnngtaaataattccaacattaaatcaaaaacgatcggatacgcatgaggct

SEQ ID NO: 2573 - DNA, 146 bp, Artificial Sequence
  Bisulfite Padlock Probe
  misc_feature 93, 94, 95, 96, 97, 98: n = A,T,C or G
gactggaagagcactgttaccccgaaataaccgttaacaactacgttggaggctcatcgttcctattcaggcagatgttatcgaggtccgacnnnnnncaactcctaatactccaccaacatcttagatcggatacgcatgaggct

SEQ ID NO: 2574 - DNA, 146 bp, Artificial Sequence
  Bisulfite Padlock Probe
  misc_feature 93, 94, 95, 96, 97, 98: n = A,T,C or G
gactggaagagcactgttaccccgaaataaccgttaacgactacgttggaggctcatcgttcctattcaggcagatgttatcgaggtccgacnnnnnncaactcctaatactccaccaacgtcttagatcggatacgcatgaggct

SEQ ID NO: 2575 - DNA, 146 bp, Artificial Sequence
  Bisulfite Padlock Probe
  misc_feature 92, 93, 94, 95, 96, 97: n = A,T,C or G
gactggaagagcactgttaccccgaacgaacttaacaacaaacgttggaggctcatcgttcctattcaggcagatgttatcgaggtccgacnnnnnnacgaaataaacaaactaaataaatcctacgatcggatacgcatgaggct

SEQ ID NO: 2576 - DNA, 146 bp, Artificial Sequence
  Bisulfite Padlock Probe
  misc_feature 92, 93, 94, 95, 96, 97: n = A,T,C or G
gactggaagagcactgttaccccgaacgaacttaacaacgaacgttggaggctcatcgttcctattcaggcagatgttatcgaggtccgacnnnnnnacgaaataaacgaactaaataaatcctacgatcggatacgcatgaggct

SEQ ID NO: 2577 - DNA, 146 bp, Artificial Sequence
  Bisulfite Padlock Probe
  misc_feature 92, 93, 94, 95, 96, 97: n = A,T,C or G
gactggaagagcactgttaccccgaactaactacaccctctacgttggaggctcatcgttcctattcaggcagatgttatcgaggtccgacnnnnnnaaattctctaccactcctataatatccttgatcggatacgcatgaggct

SEQ ID NO: 2578 - DNA, 146 bp, Artificial Sequence
  Bisulfite Padlock Probe
  misc_feature 92, 93, 94, 95, 96, 97: n = A,T,C or G
gactggaagagcactgttaccccgaactaactacgccctctacgttggaggctcatcgttcctattcaggcagatgttatcgaggtccgacnnnnnnaaattctctaccactcctataatatccttgatcggatacgcatgaggct

SEQ ID NO: 2579 - DNA, 146 bp, Artificial Sequence
  Bisulfite Padlock Probe
  misc_feature 95, 96, 97, 98, 99, 100: n = A,T,C or G
gactggaagagcactgttaccccgaactatcccaaactaaacactagttggaggctcatcgttcctattcaggcagatgttatcgaggtccgacnnnnnnctccctcctccaacaacccaaacaacgatcggatacgcatgaggct

SEQ ID NO: 2580 - DNA, 146 bp, Artificial Sequence
  Bisulfite Padlock Probe
  misc_feature 95, 96, 97, 98, 99, 100: n = A,T,C or G
gactggaagagcactgttaccccgaactatcccgaactaaacactagttggaggctcatcgttcctattcaggcagatgttatcgaggtccgacnnnnnnctccctcctccaacaacccgaacaacgatcggatacgcatgaggct

SEQ ID NO: 2581 - DNA, 146 bp, Artificial Sequence
  Bisulfite Padlock Probe
  misc_feature 92, 93, 94, 95, 96, 97: n = A,T,C or G
gactggaagagcactgttaccccgacaaacaaacaaataatacgttggaggctcatcgttcctattcaggcagatgttatcgaggtccgacnnnnnncttacaaaacctaaaacaacaaataaaaagatcggatacgcatgaggct

SEQ ID NO: 2582 - DNA, 146 bp, Artificial Sequence
  Bisulfite Padlock Probe
  misc_feature 92, 93, 94, 95, 96, 97: n = A,T,C or G
gactggaagagcactgttaccccgacgaacaaacaaataatacgttggaggctcatcgttcctattcaggcagatgttatcgaggtccgacnnnnnncttacaaaacctaaaacaacaaataaaaagatcggatacgcatgaggct

SEQ ID NO: 2583 - DNA, 146 bp, Artificial Sequence
  Bisulfite Padlock Probe
  misc_feature 93, 94, 95, 96, 97, 98: n = A,T,C or G
gactggaagagcactgttaccccgcaaacaataaacaacaaaaagttggaggctcatcgttcctattcaggcagatgttatcgaggtccgacnnnnnnatcctaaacctaacataactacccttccgatcggatacgcatgaggct

SEQ ID NO: 2584 - DNA, 146 bp, Artificial Sequence
  Bisulfite Padlock Probe
  misc_feature 92, 93, 94, 95, 96, 97: n = A,T,C or G
gactggaagagcactgttaccccgcaacaatctcaaattctctgttggaggctcatcgttcctattcaggcagatgttatcgaggtccgacnnnnnnaaaatattccaaaaataaacatctatattgatcggatacgcatgaggct

SEQ ID NO: 2585 - DNA, 146 bp, Artificial Sequence
  Bisulfite Padlock Probe
  misc_feature 92, 93, 94, 95, 96, 97: n = A,T,C or G
gactggaagagcactgttaccccgcaacaatctcgaattctctgttggaggctcatcgttcctattcaggcagatgttatcgaggtccgacnnnnnnaaaatattccaaaaataaacatctatattgatcggatacgcatgaggct

SEQ ID NO: 2586 - DNA, 146 bp, Artificial Sequence
  Bisulfite Padlock Probe
  misc_feature 93, 94, 95, 96, 97, 98: n = A,T,C or G
gactggaagagcactgttaccccgcgaacaataaacaacaaaaagttggaggctcatcgttcctattcaggcagatgttatcgaggtccgacnnnnnnatcctaaacctaacgtaactacccttccgatcggatacgcatgaggct

SEQ ID NO: 2587 - DNA, 146 bp, Artificial Sequence
  Bisulfite Padlock Probe
  misc_feature 92, 93, 94, 95, 96, 97: n = A,T,C or G
gactggaagagcactgttacccctaatacacccacaactcctcgttggaggctcatcgttcctattcaggcagatgttatcgaggtccgacnnnnnnaccacatactccgaaaccaaaacccaaaagatcggatacgcatgaggct

SEQ ID NO: 2588 - DNA, 146 bp, Artificial Sequence
  Bisulfite Padlock Probe
  misc_feature 92, 93, 94, 95, 96, 97: n = A,T,C or G
gactggaagagcactgttacccctaatacgcccacaactcctcgttggaggctcatcgttcctattcaggcagatgttatcgaggtccgacnnnnnnaccacatactccgaaaccgaaacccaaaagatcggatacgcatgaggct

SEQ ID NO: 2589 - DNA, 146 bp, Artificial Sequence
  Bisulfite Padlock Probe
  misc_feature 95, 96, 97, 98, 99, 100: n = A,T,C or G
gactggaagagcactgttacccctaatttatcaacttcgaacaaccgttggaggctcatcgttcctattcaggcagatgttatcgaggtccgacnnnnnntccaaaaccgaacactcaaaaccctcgatcggatacgcatgaggct

SEQ ID NO: 2590 - DNA, 146 bp, Artificial Sequence
  Bisulfite Padlock Probe
  misc_feature 95, 96, 97, 98, 99, 100: n = A,T,C or G
gactggaagagcactgttacccctaatttatcaacttcgaacgaccgttggaggctcatcgttcctattcaggcagatgttatcgaggtccgacnnnnnntccaaaaccgaacactcgaaaccctcgatcggatacgcatgaggct

SEQ ID NO: 2591 - DNA, 146 bp, Artificial Sequence
  Bisulfite Padlock Probe
  misc_feature 93, 94, 95, 96, 97, 98: n = A,T,C or G
gactggaagagcactgttacccctacatcccccaatttatattcgttggaggctcatcgttcctattcaggcagatgttatcgaggtccgacnnnnnnataaataaccaaaactaaaaccctactcgatcggatacgcatgaggct

SEQ ID NO: 2592 - DNA, 146 bp, Artificial Sequence
  Bisulfite Padlock Probe
  misc_feature 93, 94, 95, 96, 97, 98: n = A,T,C or G
gactggaagagcactgttacccctacatcccccaatttatattcgttggaggctcatcgttcctattcaggcagatgttatcgaggtccgacnnnnnnataaataaccgaaactaaaaccctactcgatcggatacgcatgaggct

SEQ ID NO: 2593 - DNA, 146 bp, Artificial Sequence
  Bisulfite Padlock Probe
  misc_feature 92, 93, 94, 95, 96, 97: n = A,T,C or G
gactggaagagcactgttacccctccctatatccccaacctaagttggaggctcatcgttcctattcaggcagatgttatcgaggtccgacnnnnnnaaccccaaccaaatactataaaatctccagatcggatacgcatgaggct

SEQ ID NO: 2594 - DNA, 146 bp, Artificial Sequence
  Bisulfite Padlock Probe
  misc_feature 92, 93, 94, 95, 96, 97: n = A,T,C or G
gactggaagagcactgttaccccttcgtacaacaaacacaaatgttggaggctcatcgttcctattcaggcagatgttatcgaggtccgacnnnnnnactctaataaatcttcaactcaattttaagatcggatacgcatgaggct

SEQ ID NO: 2595 - DNA, 146 bp, Artificial Sequence
  Bisulfite Padlock Probe
  misc_feature 92, 93, 94, 95, 96, 97: n = A,T,C or G
gactggaagagcactgttaccccttcgtacaacaaacgcaaatgttggaggctcatcgttcctattcaggcagatgttatcgaggtccgacnnnnnnactctaataaatcttcgactcaattttaagatcggatacgcatgaggct

SEQ ID NO: 2596 - DNA, 146 bp, Artificial Sequence
  Bisulfite Padlock Probe
  misc_feature 96, 97, 98, 99, 100, 101: n = A,T,C or G
gactggaagagcactgttaccccttttcctaaccaaaatcaaacaaagttggaggctcatcgttcctattcaggcagatgttatcgaggtccgacnnnnnnaaaaaccgaatcccaacccaaaaacgatcggatacgcatgaggct

SEQ ID NO: 2597 - DNA, 146 bp, Artificial Sequence
  Bisulfite Padlock Probe
  misc_feature 96, 97, 98, 99, 100, 101: n = A,T,C or G
gactggaagagcactgttaccccttttcctaaccaaaatcaaacaaagttggaggctcatcgttcctattcaggcagatgttatcgaggtccgacnnnnnnaaaaaccgaatcccaacccgaaaacgatcggatacgcatgaggct

SEQ ID NO: 2598 - DNA, 146 bp, Artificial Sequence
  Bisulfite Padlock Probe
  misc_feature 95, 96, 97, 98, 99, 100: n = A,T,C or G
gactggaagagcactgttacccgaaaaataacgcaccaataatcaagttggaggctcatcgttcctattcaggcagatgttatcgaggtccgacnnnnnnaaatccccgaaccgtaacaaaaacacgatcggatacgcatgaggct

SEQ ID NO: 2599 - DNA, 146 bp, Artificial Sequence
  Bisulfite Padlock Probe
  misc_feature 95, 96, 97, 98, 99, 100: n = A,T,C or G
gactggaagagcactgttacccgaaaaataacgcgccaataatcaagttggaggctcatcgttcctattcaggcagatgttatcgaggtccgacnnnnnnaaatccccgaaccgtaacaaaaacgcgatcggatacgcatgaggct

SEQ ID NO: 2600 - DNA, 146 bp, Artificial Sequence
  Bisulfite Padlock Probe
  misc_feature 92, 93, 94, 95, 96, 97: n = A,T,C or G
gactggaagagcactgttacccgaaaactctcgaactacactagttggaggctcatcgttcctattcaggcagatgttatcgaggtccgacnnnnnntatactccaaactcctaaaactcctactagatcggatacgcatgaggct

SEQ ID NO: 2601 - DNA, 146 bp, Artificial Sequence
  Bisulfite Padlock Probe
  misc_feature 92, 93, 94, 95, 96, 97: n = A,T,C or G
gactggaagagcactgttacccgaaaactctcgaactacgctagttggaggctcatcgttcctattcaggcagatgttatcgaggtccgacnnnnnntatactccgaactcctaaaactcctactagatcggatacgcatgaggct

SEQ ID NO: 2602 - DNA, 146 bp, Artificial Sequence
  Bisulfite Padlock Probe
  misc_feature 92, 93, 94, 95, 96, 97: n = A,T,C or G
gactggaagagcactgttacccgaaacacccccaaaactaaaagttggaggctcatcgttcctattcaggcagatgttatcgaggtccgacnnnnnncctatattcaaacacaaaatctttacaaagatcggatacgcatgaggct

SEQ ID NO: 2603 - DNA, 146 bp, Artificial Sequence
  Bisulfite Padlock Probe
  misc_feature 92, 93, 94, 95, 96, 97: n = A,T,C or G
gactggaagagcactgttacccgaaacgcccccaaaactaaaagttggaggctcatcgttcctattcaggcagatgttatcgaggtccgacnnnnnncctatattcaaacacaaaatctttacaaagatcggatacgcatgaggct

SEQ ID NO: 2604 - DNA, 146 bp, Artificial Sequence
  Bisulfite Padlock Probe
  misc_feature 92, 93, 94, 95, 96, 97: n = A,T,C or G
gactggaagagcactgttacccgaaatcaaaacatcaaaccccgttggaggctcatcgttcctattcaggcagatgttatcgaggtccgacnnnnnnataaactcccgaccaccctaaacatactagatcggatacgcatgaggct

SEQ ID NO: 2605 - DNA, 146 bp, Artificial Sequence
  Bisulfite Padlock Probe
  misc_feature 92, 93, 94, 95, 96, 97: n = A,T,C or G
gactggaagagcactgttacccgaaatcaaaacgtcaaaccccgttggaggctcatcgttcctattcaggcagatgttatcgaggtccgacnnnnnnataaactcccgaccgccctaaacatactagatcggatacgcatgaggct

SEQ ID NO: 2606 - DNA, 146 bp, Artificial Sequence
  Bisulfite Padlock Probe
  misc_feature 92, 93, 94, 95, 96, 97: n = A,T,C or G
gactggaagagcactgttacccgaaccccaccactctcaaaacgttggaggctcatcgttcctattcaggcagatgttatcgaggtccgacnnnnnntacccaaccccataataatcgcaaccaccgatcggatacgcatgaggct

SEQ ID NO: 2607 - DNA, 146 bp, Artificial Sequence
  Bisulfite Padlock Probe
  misc_feature 93, 94, 95, 96, 97, 98: n = A,T,C or G
gactggaagagcactgttacccgaactcgaaccgcatatacaaagttggaggctcatcgttcctattcaggcagatgttatcgaggtccgacnnnnnncaataaaacgctccccgacaactcctacgatcggatacgcatgaggct

SEQ ID NO: 2608 - DNA, 146 bp, Artificial Sequence
  Bisulfite Padlock Probe
  misc_feature 93, 94, 95, 96, 97, 98: n = A,T,C or G
gactggaagagcactgttacccgaactcgaaccgcgtatacaaagttggaggctcatcgttcctattcaggcagatgttatcgaggtccgacnnnnnncaataaaacgctccccgacgactcctacgatcggatacgcatgaggct

SEQ ID NO: 2609 - DNA, 146 bp, Artificial Sequence
  Bisulfite Padlock Probe
  misc_feature 94, 95, 96, 97, 98, 99: n = A,T,C or G
gactggaagagcactgttacccgaatctaacctctaaataaccacgttggaggctcatcgttcctattcaggcagatgttatcgaggtccgacnnnnnncacgacgaaaccacaaacccccaaaaagatcggatacgcatgaggct

SEQ ID NO: 2610 - DNA, 146 bp, Artificial Sequence
  Bisulfite Padlock Probe
  misc_feature 94, 95, 96, 97, 98, 99: n = A,T,C or G
gactggaagagcactgttacccgactcccaaacatcaaactaaacgttggaggctcatcgttcctattcaggcagatgttatcgaggtccgacnnnnnnactataaacctaacaaactcacacaaagatcggatacgcatgaggct

SEQ ID NO: 2611 - DNA, 146 bp, Artificial Sequence
  Bisulfite Padlock Probe
  misc_feature 94, 95, 96, 97, 98, 99: n = A,T,C or G
gactggaagagcactgttacccgactcccaaacatcgaactaaacgttggaggctcatcgttcctattcaggcagatgttatcgaggtccgacnnnnnnactataaacctaacaaactcgcacaaagatcggatacgcatgaggct

SEQ ID NO: 2612 - DNA, 146 bp, Artificial Sequence
  Bisulfite Padlock Probe
  misc_feature 93, 94, 95, 96, 97, 98: n = A,T,C or G
gactggaagagcactgttacccgccattaatcgacttccattacgttggaggctcatcgttcctattcaggcagatgttatcgaggtccgacnnnnnnctaaacttcgcgaaaccacctccaaaacgatcggatacgcatgaggct

SEQ ID NO: 2613 - DNA, 146 bp, Artificial Sequence
  Bisulfite Padlock Probe
  misc_feature 93, 94, 95, 96, 97, 98: n = A,T,C or G
gactggaagagcactgttacccgccattaatcgacttccgttacgttggaggctcatcgttcctattcaggcagatgttatcgaggtccgacnnnnnnctaaacttcgcgaaaccgcctccaaaacgatcggatacgcatgaggct

SEQ ID NO: 2614 - DNA, 146 bp, Artificial Sequence
  Bisulfite Padlock Probe
  misc_feature 94, 95, 96, 97, 98, 99: n = A,T,C or G
gactggaagagcactgttacccgctataatttttcccccaaaatcgttggaggctcatcgttcctattcaggcagatgttatcgaggtccgacnnnnnnaaaaacgcaaatctcgaattaactaccgatcggatacgcatgaggct

SEQ ID NO: 2615 - DNA, 146 bp, Artificial Sequence
  Bisulfite Padlock Probe
  misc_feature 92, 93, 94, 95, 96, 97: n = A,T,C or G
gactggaagagcactgttacccgtcaacttcaccataaaaaccgttggaggctcatcgttcctattcaggcagatgttatcgaggtccgacnnnnnnacttcgtacccgcgacctacaaaaaattcgatcggatacgcatgaggct

SEQ ID NO: 2616 - DNA, 146 bp, Artificial Sequence
  Bisulfite Padlock Probe
  misc_feature 92, 93, 94, 95, 96, 97: n = A,T,C or G
gactggaagagcactgttacccgtcaacttcgccataaaaaccgttggaggctcatcgttcctattcaggcagatgttatcgaggtccgacnnnnnnacttcgtacccgcgacctacgaaaaattcgatcggatacgcatgaggct

SEQ ID NO: 2617 - DNA, 146 bp, Artificial Sequence
  Bisulfite Padlock Probe
  misc_feature 93, 94, 95, 96, 97, 98: n = A,T,C or G
gactggaagagcactgttaccctaaaaaccccttctcctcatccgttggaggctcatcgttcctattcaggcagatgttatcgaggtccgacnnnnnnaaaaactccgcaacgacaaacgacaaaagatcggatacgcatgaggct

SEQ ID NO: 2618 - DNA, 146 bp, Artificial Sequence
  Bisulfite Padlock Probe
  misc_feature 93, 94, 95, 96, 97, 98: n = A,T,C or G
gactggaagagcactgttaccctaaaaaccccttctcctcatccgttggaggctcatcgttcctattcaggcagatgttatcgaggtccgacnnnnnnaaaaactccgcaacgacaaacgacgaaagatcggatacgcatgaggct

SEQ ID NO: 2619 - DNA, 146 bp, Artificial Sequence
  Bisulfite Padlock Probe
  misc_feature 93, 94, 95, 96, 97, 98: n = A,T,C or G
gactggaagagcactgttaccctaaaaccaaaaaatctctacaagttggaggctcatcgttcctattcaggcagatgttatcgaggtccgacnnnnnnaaaaacataacgcgcacctataaataacgatcggatacgcatgaggct

SEQ ID NO: 2620 - DNA, 146 bp, Artificial Sequence
  Bisulfite Padlock Probe
  misc_feature 93, 94, 95, 96, 97, 98: n = A,T,C or G
gactggaagagcactgttaccctaaaaccgaaaaatctctacaagttggaggctcatcgttcctattcaggcagatgttatcgaggtccgacnnnnnnaaaaacataacgcgcgcctataaataacgatcggatacgcatgaggct

SEQ ID NO: 2621 - DNA, 146 bp, Artificial Sequence
  Bisulfite Padlock Probe
  misc_feature 95, 96, 97, 98, 99, 100: n = A,T,C or G
gactggaagagcactgttaccctaaactaaaaataaccaaataaaagttggaggctcatcgttcctattcaggcagatgttatcgaggtccgacnnnnnnccaatataactcatattaactaaaaagatcggatacgcatgaggct

SEQ ID NO: 2622 - DNA, 146 bp, Artificial Sequence
  Bisulfite Padlock Probe
  misc_feature 95, 96, 97, 98, 99, 100: n = A,T,C or G
gactggaagagcactgttaccctaaactaaaaataaccaaataaaagttggaggctcatcgttcctattcaggcagatgttatcgaggtccgacnnnnnnccgatataactcatattaactaaaaagatcggatacgcatgaggct

SEQ ID NO: 2623 - DNA, 146 bp, Artificial Sequence
  Bisulfite Padlock Probe
  misc_feature 94, 95, 96, 97, 98, 99: n = A,T,C or G
gactggaagagcactgttaccctaccgacaaaatcctccccttacgttggaggctcatcgttcctattcaggcagatgttatcgaggtccgacnnnnnncccaccgtaaaacactttcccaaaaccgatcggatacgcatgaggct

SEQ ID NO: 2624 - DNA, 146 bp, Artificial Sequence
  Bisulfite Padlock Probe
  misc_feature 94, 95, 96, 97, 98, 99: n = A,T,C or G
gactggaagagcactgttaccctaccgacgaaatcctccccttacgttggaggctcatcgttcctattcaggcagatgttatcgaggtccgacnnnnnncccaccgtaaaacgctttcccaaaaccgatcggatacgcatgaggct

SEQ ID NO: 2625 - DNA, 146 bp, Artificial Sequence
  Bisulfite Padlock Probe
  misc_feature 92, 93, 94, 95, 96, 97: n = A,T,C or G
gactggaagagcactgttaccctactccaacccctaaacaaccgttggaggctcatcgttcctattcaggcagatgttatcgaggtccgacnnnnnnacaacgcgaaaataaacgaaaccacaatagatcggatacgcatgaggct

SEQ ID NO: 2626 - DNA, 146 bp, Artificial Sequence
  Bisulfite Padlock Probe
  misc_feature 92, 93, 94, 95, 96, 97: n = A,T,C or G
gactggaagagcactgttaccctactccaacccctaaacgaccgttggaggctcatcgttcctattcaggcagatgttatcgaggtccgacnnnnnnacaacgcgaaaataaacgaaaccgcaatagatcggatacgcatgaggct

SEQ ID NO: 2627 - DNA, 146 bp, Artificial Sequence
  Bisulfite Padlock Probe
  misc_feature 96, 97, 98, 99, 100, 101: n = A,T,C or G
gactggaagagcactgttaccctactcgaccgcaatacttaataaaagttggaggctcatcgttcctattcaggcagatgttatcgaggtccgacnnnnnnacctcaattaccacaacaatcaatcgatcggatacgcatgaggct

SEQ ID NO: 2628 - DNA, 146 bp, Artificial Sequence
  Bisulfite Padlock Probe
  misc_feature 96, 97, 98, 99, 100, 101: n = A,T,C or G
gactggaagagcactgttaccctactcgaccgcgatacttaataaaagttggaggctcatcgttcctattcaggcagatgttatcgaggtccgacnnnnnnacctcaattaccacaacaatcaatcgatcggatacgcatgaggct

SEQ ID NO: 2629 - DNA, 146 bp, Artificial Sequence
  Bisulfite Padlock Probe
  misc_feature 92, 93, 94, 95, 96, 97: n = A,T,C or G
gactggaagagcactgttaccctccccctaaacacaatacccagttggaggctcatcgttcctattcaggcagatgttatcgaggtccgacnnnnnnaacaatacctacatccaaatcacaactcagatcggatacgcatgaggct

SEQ ID NO: 2630 - DNA, 146 bp, Artificial Sequence
  Bisulfite Padlock Probe
  misc_feature 92, 93, 94, 95, 96, 97: n = A,T,C or G
gactggaagagcactgttaccctccccctaaacacgatacccagttggaggctcatcgttcctattcaggcagatgttatcgaggtccgacnnnnnnaacaatacctacatccaaatcgcaactcagatcggatacgcatgaggct

SEQ ID NO: 2631 - DNA, 146 bp, Artificial Sequence
  Bisulfite Padlock Probe
  misc_feature 92, 93, 94, 95, 96, 97: n = A,T,C or G
gactggaagagcactgttacccttaaacaacctcactctacaagttggaggctcatcgttcctattcaggcagatgttatcgaggtccgacnnnnnnaatcaaaaccccctccctaaactaaactcgatcggatacgcatgaggct

SEQ ID NO: 2632 - DNA, 146 bp, Artificial Sequence
  Bisulfite Padlock Probe
  misc_feature 92, 93, 94, 95, 96, 97: n = A,T,C or G
gactggaagagcactgttacccttaaacaacctcgctctacaagttggaggctcatcgttcctattcaggcagatgttatcgaggtccgacnnnnnnaatcaaaaccccctccctaaactaaactcgatcggatacgcatgaggct

SEQ ID NO: 2633 - DNA, 146 bp, Artificial Sequence
  Bisulfite Padlock Probe
  misc_feature 94, 95, 96, 97, 98, 99: n = A,T,C or G
gactggaagagcactgttacccttaacaaaaaattctcccaaaacgttggaggctcatcgttcctattcaggcagatgttatcgaggtccgacnnnnnnacccacctccacgtcactactcatatcgatcggatacgcatgaggct

SEQ ID NO: 2634 - DNA, 146 bp, Artificial Sequence
  Bisulfite Padlock Probe
  misc_feature 94, 95, 96, 97, 98, 99: n = A,T,C or G
gactggaagagcactgttacccttaacgaaaaattctcccaaaacgttggaggctcatcgttcctattcaggcagatgttatcgaggtccgacnnnnnnacccacctccacgtcgctactcatatcgatcggatacgcatgaggct

SEQ ID NO: 2635 - DNA, 146 bp, Artificial Sequence
  Bisulfite Padlock Probe
  misc_feature 94, 95, 96, 97, 98, 99: n = A,T,C or G
gactggaagagcactgttacccttcaaaaacgaacccacaaactcgttggaggctcatcgttcctattcaggcagatgttatcgaggtccgacnnnnnnaaataaaatccatcaccataataaccagatcggatacgcatgaggct

SEQ ID NO: 2636 - DNA, 146 bp, Artificial Sequence
  Bisulfite Padlock Probe
  misc_feature 94, 95, 96, 97, 98, 99: n = A,T,C or G
gactggaagagcactgttacccttcaaaaacgaacccgcaaactcgttggaggctcatcgttcctattcaggcagatgttatcgaggtccgacnnnnnnaaataaaatccatcaccgtaataaccagatcggatacgcatgaggct

SEQ ID NO: 2637 - DNA, 146 bp, Artificial Sequence
  Bisulfite Padlock Probe
  misc_feature 94, 95, 96, 97, 98, 99: n = A,T,C or G
gactggaagagcactgttacccttccttcctcaatcaccaaaaacgttggaggctcatcgttcctattcaggcagatgttatcgaggtccgacnnnnnnaccacacccattctcactataaatctcgatcggatacgcatgaggct

SEQ ID NO: 2638 - DNA, 146 bp, Artificial Sequence
  Bisulfite Padlock Probe
  misc_feature 92, 93, 94, 95, 96, 97: n = A,T,C or G
gactggaagagcactgttacccttctaaaaactccattctaccgttggaggctcatcgttcctattcaggcagatgttatcgaggtccgacnnnnnntcctccaactaaaaccgtaaccaccctaagatcggatacgcatgaggct

SEQ ID NO: 2639 - DNA, 146 bp, Artificial Sequence
  Bisulfite Padlock Probe
  misc_feature 92, 93, 94, 95, 96, 97: n = A,T,C or G
gactggaagagcactgttacccttctaaaaactccattctaccgttggaggctcatcgttcctattcaggcagatgttatcgaggtccgacnnnnnntcctccaactaaaaccgtaaccgccctaagatcggatacgcatgaggct

SEQ ID NO: 2640 - DNA, 146 bp, Artificial Sequence
  Bisulfite Padlock Probe
  misc_feature 92, 93, 94, 95, 96, 97: n = A,T,C or G
gactggaagagcactgttaccctttataatctcaaacctaaacgttggaggctcatcgttcctattcaggcagatgttatcgaggtccgacnnnnnnatccaacttacccaacccaaaacctaaccgatcggatacgcatgaggct

SEQ ID NO: 2641 - DNA, 146 bp, Artificial Sequence
  Bisulfite Padlock Probe
  misc_feature 92, 93, 94, 95, 96, 97: n = A,T,C or G
gactggaagagcactgttaccctttataatctcaaacctaaacgttggaggctcatcgttcctattcaggcagatgttatcgaggtccgacnnnnnnatccaacttacccgacccaaaacctaaccgatcggatacgcatgaggct

SEQ ID NO: 2642 - DNA, 146 bp, Artificial Sequence
  Bisulfite Padlock Probe
  misc_feature 96, 97, 98, 99, 100, 101: n = A,T,C or G
gactggaagagcactgttaccctttcaataacaaacaaatcaaaccagttggaggctcatcgttcctattcaggcagatgttatcgaggtccgacnnnnnnacaacaacaaatcacaccaactaacgatcggatacgcatgaggct

SEQ ID NO: 2643 - DNA, 146 bp, Artificial Sequence
  Bisulfite Padlock Probe
  misc_feature 96, 97, 98, 99, 100, 101: n = A,T,C or G
gactggaagagcactgttaccctttcaataacgaacaaatcaaaccagttggaggctcatcgttcctattcaggcagatgttatcgaggtccgacnnnnnnacaacaacaaatcgcaccaactaacgatcggatacgcatgaggct

SEQ ID NO: 2644 - DNA, 146 bp, Artificial Sequence
  Bisulfite Padlock Probe
  misc_feature 95, 96, 97, 98, 99, 100: n = A,T,C or G
gactggaagagcactgttaccgaaaaactattaaaataacaaaaacgttggaggctcatcgttcctattcaggcagatgttatcgaggtccgacnnnnnnctaataatttcaccgctctatataaagatcggatacgcatgaggct

SEQ ID NO: 2645 - DNA, 146 bp, Artificial Sequence
  Bisulfite Padlock Probe
  misc_feature 92, 93, 94, 95, 96, 97: n = A,T,C or G
gactggaagagcactgttaccgaaaactaaaccaaaacaaaaagttggaggctcatcgttcctattcaggcagatgttatcgaggtccgacnnnnnncatcaaaaacacaacttaaaaatcctaccgatcggatacgcatgaggct

SEQ ID NO: 2646 - DNA, 146 bp, Artificial Sequence
  Bisulfite Padlock Probe
  misc_feature 92, 93, 94, 95, 96, 97: n = A,T,C or G
gactggaagagcactgttaccgaaaactaaaccgaaacaaaaagttggaggctcatcgttcctattcaggcagatgttatcgaggtccgacnnnnnncatcaaaaacgcaacttaaaaatcctaccgatcggatacgcatgaggct

SEQ ID NO: 2647 - DNA, 146 bp, Artificial Sequence
  Bisulfite Padlock Probe
  misc_feature 96, 97, 98, 99, 100, 101: n = A,T,C or G
gactggaagagcactgttaccgaaacacgtataacgacgacaaaaaagttggaggctcatcgttcctattcaggcagatgttatcgaggtccgacnnnnnnactcaacgatcctcgacaacatcccgatcggatacgcatgaggct

SEQ ID NO: 2648 - DNA, 146 bp, Artificial Sequence
  Bisulfite Padlock Probe
  misc_feature 96, 97, 98, 99, 100, 101: n = A,T,C or G
gactggaagagcactgttaccgaaacacgtataacgacgacgaaaaagttggaggctcatcgttcctattcaggcagatgttatcgaggtccgacnnnnnnactcaacgatcctcgacaacgtcccgatcggatacgcatgaggct

SEQ ID NO: 2649 - DNA, 146 bp, Artificial Sequence
  Bisulfite Padlock Probe
  misc_feature 92, 93, 94, 95, 96, 97: n = A,T,C or G
gactggaagagcactgttaccgaaacactaccctaacaaaaaagttggaggctcatcgttcctattcaggcagatgttatcgaggtccgacnnnnnntaaacgacaaacaaaaacaaacaaaataagatcggatacgcatgaggct

SEQ ID NO: 2650 - DNA, 146 bp, Artificial Sequence
  Bisulfite Padlock Probe
  misc_feature 92, 93, 94, 95, 96, 97: n = A,T,C or G
gactggaagagcactgttaccgaaacactaccctaacgaaaaagttggaggctcatcgttcctattcaggcagatgttatcgaggtccgacnnnnnntaaacgacgaacaaaaacaaacaaaataagatcggatacgcatgaggct

SEQ ID NO: 2651 - DNA, 146 bp, Artificial Sequence
  Bisulfite Padlock Probe
  misc_feature 93, 94, 95, 96, 97, 98: n = A,T,C or G
gactggaagagcactgttaccgaaaccgaaacccgaatcaaaacgttggaggctcatcgttcctattcaggcagatgttatcgaggtccgacnnnnnnaaaacccctaaaaatctaacgacaaatagatcggatacgcatgaggct

SEQ ID NO: 2652 - DNA, 146 bp, Artificial Sequence
  Bisulfite Padlock Probe
  misc_feature 93, 94, 95, 96, 97, 98: n = A,T,C or G
gactggaagagcactgttaccgaaaccgaaacccgaatcgaaacgttggaggctcatcgttcctattcaggcagatgttatcgaggtccgacnnnnnnaaaacccctaaaaatctaacgacgaatagatcggatacgcatgaggct

SEQ ID NO: 2653 - DNA, 146 bp, Artificial Sequence
  Bisulfite Padlock Probe
  misc_feature 92, 93, 94, 95, 96, 97: n = A,T,C or G
gactggaagagcactgttaccgaaaccgccgaacccaaaataagttggaggctcatcgttcctattcaggcagatgttatcgaggtccgacnnnnnnctccaactcaaaaactacaacttctaacagatcggatacgcatgaggct

SEQ ID NO: 2654 - DNA, 146 bp, Artificial Sequence
  Bisulfite Padlock Probe
  misc_feature 92, 93, 94, 95, 96, 97: n = A,T,C or G
gactggaagagcactgttaccgaaaccgccgaacccgaaataagttggaggctcatcgttcctattcaggcagatgttatcgaggtccgacnnnnnnctccaactcgaaaactacaacttctaacagatcggatacgcatgaggct

SEQ ID NO: 2655 - DNA, 146 bp, Artificial Sequence
  Bisulfite Padlock Probe
  misc_feature 92, 93, 94, 95, 96, 97: n = A,T,C or G
gactggaagagcactgttaccgaacccccaaataaaaataaaagttggaggctcatcgttcctattcaggcagatgttatcgaggtccgacnnnnnnataactaccttacactaaaattaaaaatagatcggatacgcatgaggct

SEQ ID NO: 2656 - DNA, 146 bp, Artificial Sequence
  Bisulfite Padlock Probe
  misc_feature 92, 93, 94, 95, 96, 97: n = A,T,C or G
gactggaagagcactgttaccgaacccccgaataaaaataaaagttggaggctcatcgttcctattcaggcagatgttatcgaggtccgacnnnnnnataactaccttacgctaaaattaaaaatagatcggatacgcatgaggct

SEQ ID NO: 2657 - DNA, 146 bp, Artificial Sequence
  Bisulfite Padlock Probe
  misc_feature 92, 93, 94, 95, 96, 97: n = A,T,C or G
gactggaagagcactgttaccgaactaaactttaaaaccgcacgttggaggctcatcgttcctattcaggcagatgttatcgaggtccgacnnnnnnaaaccattaatcacacgctcccaaacaacgatcggatacgcatgaggct

SEQ ID NO: 2658 - DNA, 146 bp, Artificial Sequence
  Bisulfite Padlock Probe
  misc_feature 92, 93, 94, 95, 96, 97: n = A,T,C or G
gactggaagagcactgttaccgaactaaactttaaaaccgcgcgttggaggctcatcgttcctattcaggcagatgttatcgaggtccgacnnnnnnaaaccattaatcacacgctcccgaacaacgatcggatacgcatgaggct

SEQ ID NO: 2659 - DNA, 146 bp, Artificial Sequence
  Bisulfite Padlock Probe
  misc_feature 92, 93, 94, 95, 96, 97: n = A,T,C or G
gactggaagagcactgttaccgaactatccccgaaaacaaaaagttggaggctcatcgttcctattcaggcagatgttatcgaggtccgacnnnnnntaaaacaccgcaacaaaaacgtccaaaacgatcggatacgcatgaggct

SEQ ID NO: 2660 - DNA, 146 bp, Artificial Sequence
  Bisulfite Padlock Probe
  misc_feature 92, 93, 94, 95, 96, 97: n = A,T,C or G
gactggaagagcactgttaccgaactatccccgaaaacgaaaagttggaggctcatcgttcctattcaggcagatgttatcgaggtccgacnnnnnntaaaacaccgcaacaaaaacgtccgaaacgatcggatacgcatgaggct

SEQ ID NO: 2661 - DNA, 146 bp, Artificial Sequence
  Bisulfite Padlock Probe
  misc_feature 94, 95, 96, 97, 98, 99: n = A,T,C or G
gactggaagagcactgttaccgaatcaataatccaataataacccgttggaggctcatcgttcctattcaggcagatgttatcgaggtccgacnnnnnnaaaaaccgccgaccaaaccctaaaaacgatcggatacgcatgaggct

SEQ ID NO: 2662 - DNA, 146 bp, Artificial Sequence
  Bisulfite Padlock Probe
  misc_feature 94, 95, 96, 97, 98, 99: n = A,T,C or G
gactggaagagcactgttaccgaatcgataatccaataataacccgttggaggctcatcgttcctattcaggcagatgttatcgaggtccgacnnnnnnaaaaaccgccgaccgaaccctaaaaacgatcggatacgcatgaggct

SEQ ID NO: 2663 - DNA, 146 bp, Artificial Sequence
  Bisulfite Padlock Probe
  misc_feature 92, 93, 94, 95, 96, 97: n = A,T,C or G
gactggaagagcactgttaccgaatctctccacaacctccatagttggaggctcatcgttcctattcaggcagatgttatcgaggtccgacnnnnnnatctaaaaccaattaaaatacaaaaaacagatcggatacgcatgaggct

SEQ ID NO: 2664 - DNA, 146 bp, Artificial Sequence
  Bisulfite Padlock Probe
  misc_feature 92, 93, 94, 95, 96, 97: n = A,T,C or G
gactggaagagcactgttaccgaatctctccacaacctccgtagttggaggctcatcgttcctattcaggcagatgttatcgaggtccgacnnnnnnatctaaaaccaattaaaatacgaaaaacagatcggatacgcatgaggct

SEQ ID NO: 2665 - DNA, 146 bp, Artificial Sequence
  Bisulfite Padlock Probe
  misc_feature 93, 94, 95, 96, 97, 98: n = A,T,C or G
gactggaagagcactgttaccgaatttctaaactttcttaaaaagttggaggctcatcgttcctattcaggcagatgttatcgaggtccgacnnnnnnctaccgaaatctacccacaacctaacacgatcggatacgcatgaggct

SEQ ID NO: 2666 - DNA, 146 bp, Artificial Sequence
  Bisulfite Padlock Probe
  misc_feature 96, 97, 98, 99, 100, 101: n = A,T,C or G
gactggaagagcactgttaccgacctaaattcccccaaaaacaaaaagttggaggctcatcgttcctattcaggcagatgttatcgaggtccgacnnnnnnaccaaatctcgtttacatccaaaaagatcggatacgcatgaggct

SEQ ID NO: 2667 - DNA, 146 bp, Artificial Sequence
  Bisulfite Padlock Probe
  misc_feature 96, 97, 98, 99, 100, 101: n = A,T,C or G
gactggaagagcactgttaccgacgaactaaacgactcaacaacctagttggaggctcatcgttcctattcaggcagatgttatcgaggtccgacnnnnnncccctccccgcccaaataactaaacgatcggatacgcatgaggct

SEQ ID NO: 2668 - DNA, 146 bp, Artificial Sequence
  Bisulfite Padlock Probe
  misc_feature 96, 97, 98, 99, 100, 101: n = A,T,C or G
gactggaagagcactgttaccgacgaactaaacgactcgacaacctagttggaggctcatcgttcctattcaggcagatgttatcgaggtccgacnnnnnncccctccccgcccgaataactaaacgatcggatacgcatgaggct

SEQ ID NO: 2669 - DNA, 146 bp, Artificial Sequence
  Bisulfite Padlock Probe
  misc_feature 92, 93, 94, 95, 96, 97: n = A,T,C or G
gactggaagagcactgttaccgactatcaccgcacataaaactgttggaggctcatcgttcctattcaggcagatgttatcgaggtccgacnnnnnnctctcttacgcttattaatatcgacactagatcggatacgcatgaggct

SEQ ID NO: 2670 - DNA, 146 bp, Artificial Sequence
  Bisulfite Padlock Probe
  misc_feature 92, 93, 94, 95, 96, 97: n = A,T,C or G
gactggaagagcactgttaccgactatcaccgcacgtaaaactgttggaggctcatcgttcctattcaggcagatgttatcgaggtccgacnnnnnnctctcttacgcttattaatatcgacgctagatcggatacgcatgaggct

SEQ ID NO: 2671 - DNA, 146 bp, Artificial Sequence
  Bisulfite Padlock Probe
  misc_feature 95, 96, 97, 98, 99, 100: n = A,T,C or G
gactggaagagcactgttaccgactccttaaccgcgaaacaaaaaagttggaggctcatcgttcctattcaggcagatgttatcgaggtccgacnnnnnnccgacacaatccgaaaaacccaaaacgatcggatacgcatgaggct

SEQ ID NO: 2672 - DNA, 146 bp, Artificial Sequence
  Bisulfite Padlock Probe
  misc_feature 95, 96, 97, 98, 99, 100: n = A,T,C or G
gactggaagagcactgttaccgactccttaaccgcgaaacgaaaaagttggaggctcatcgttcctattcaggcagatgttatcgaggtccgacnnnnnnccgacacaatccgaaaaacccgaaacgatcggatacgcatgaggct

SEQ ID NO: 2673 - DNA, 146 bp, Artificial Sequence
  Bisulfite Padlock Probe
  misc_feature 93, 94, 95, 96, 97, 98: n = A,T,C or G
gactggaagagcactgttaccgataccacccctataacaaaaacgttggaggctcatcgttcctattcaggcagatgttatcgaggtccgacnnnnnnaactactcaaccacctacgaacccacacgatcggatacgcatgaggct

SEQ ID NO: 2674 - DNA, 146 bp, Artificial Sequence
  Bisulfite Padlock Probe
  misc_feature 93, 94, 95, 96, 97, 98: n = A,T,C or G
gactggaagagcactgttaccgatacctattcgcacccaacaacgttggaggctcatcgttcctattcaggcagatgttatcgaggtccgacnnnnnnccctaaacccgcaatccaaaaacatattgatcggatacgcatgaggct

SEQ ID NO: 2675 - DNA, 146 bp, Artificial Sequence
  Bisulfite Padlock Probe
  misc_feature 93, 94, 95, 96, 97, 98: n = A,T,C or G
gactggaagagcactgttaccgatacctattcgcacccgacaacgttggaggctcatcgttcctattcaggcagatgttatcgaggtccgacnnnnnnccctaaacccgcaatccgaaaacatattgatcggatacgcatgaggct

SEQ ID NO: 2676 - DNA, 146 bp, Artificial Sequence
  Bisulfite Padlock Probe
  misc_feature 94, 95, 96, 97, 98, 99: n = A,T,C or G
gactggaagagcactgttaccgcaccaactaaaaacaaccaaaaagttggaggctcatcgttcctattcaggcagatgttatcgaggtccgacnnnnnncctccctctacctcaaaacacctattcgatcggatacgcatgaggct

SEQ ID NO: 2677 - DNA, 146 bp, Artificial Sequence
  Bisulfite Padlock Probe
  misc_feature 94, 95, 96, 97, 98, 99: n = A,T,C or G
gactggaagagcactgttaccgcaccgactaaaaacaaccaaaaagttggaggctcatcgttcctattcaggcagatgttatcgaggtccgacnnnnnncctccctctacctcaaaacacctattcgatcggatacgcatgaggct

SEQ ID NO: 2678 - DNA, 146 bp, Artificial Sequence
  Bisulfite Padlock Probe
  misc_feature 92, 93, 94, 95, 96, 97: n = A,T,C or G
gactggaagagcactgttaccgcactaccgcaaaaacctataagttggaggctcatcgttcctattcaggcagatgttatcgaggtccgacnnnnnncaatcataataaataaaattaataacctcgatcggatacgcatgaggct

SEQ ID NO: 2679 - DNA, 146 bp, Artificial Sequence
  Bisulfite Padlock Probe
  misc_feature 92, 93, 94, 95, 96, 97: n = A,T,C or G
gactggaagagcactgttaccgcactaccgcgaaaacctataagttggaggctcatcgttcctattcaggcagatgttatcgaggtccgacnnnnnncaatcgtaataaataaaattaataacctcgatcggatacgcatgaggct

SEQ ID NO: 2680 - DNA, 146 bp, Artificial Sequence
  Bisulfite Padlock Probe
  misc_feature 96, 97, 98, 99, 100, 101: n = A,T,C or G
gactggaagagcactgttaccgcgatacctaacgaactaacaaaaccgttggaggctcatcgttcctattcaggcagatgttatcgaggtccgacnnnnnnatcaactatcgacgcgcactcactcgatcggatacgcatgaggct

SEQ ID NO: 2681 - DNA, 146 bp, Artificial Sequence
  Bisulfite Padlock Probe
  misc_feature 96, 97, 98, 99, 100, 101: n = A,T,C or G
gactggaagagcactgttaccgcgatacctaacgaactaacgaaaccgttggaggctcatcgttcctattcaggcagatgttatcgaggtccgacnnnnnnatcaactatcgacgcgcactcgctcgatcggatacgcatgaggct

SEQ ID NO: 2682 - DNA, 146 bp, Artificial Sequence
  Bisulfite Padlock Probe
  misc_feature 93, 94, 95, 96, 97, 98: n = A,T,C or G
gactggaagagcactgttaccgcgcactttacacctaaatttacgttggaggctcatcgttcctattcaggcagatgttatcgaggtccgacnnnnnnaaatcgaaaaatccttccgaaacaaaacgatcggatacgcatgaggct

SEQ ID NO: 2683 - DNA, 146 bp, Artificial Sequence
  Bisulfite Padlock Probe
  misc_feature 93, 94, 95, 96, 97, 98: n = A,T,C or G
gactggaagagcactgttaccgcgcactttacgcctaaatttacgttggaggctcatcgttcctattcaggcagatgttatcgaggtccgacnnnnnnaaatcgaaaaatccttccgaaacgaaacgatcggatacgcatgaggct

SEQ ID NO: 2684 - DNA, 146 bp, Artificial Sequence
  Bisulfite Padlock Probe
  misc_feature 92, 93, 94, 95, 96, 97: n = A,T,C or G
gactggaagagcactgttaccgctcccctccactatactaaacgttggaggctcatcgttcctattcaggcagatgttatcgaggtccgacnnnnnncctactaaaccctacaccaactacaaaatgatcggatacgcatgaggct

SEQ ID NO: 2685 - DNA, 146 bp, Artificial Sequence
  Bisulfite Padlock Probe
  misc_feature 92, 93, 94, 95, 96, 97: n = A,T,C or G
gactggaagagcactgttaccgctcccctccgctatactaaacgttggaggctcatcgttcctattcaggcagatgttatcgaggtccgacnnnnnncctactaaaccctacaccaactacaaaatgatcggatacgcatgaggct

SEQ ID NO: 2686 - DNA, 146 bp, Artificial Sequence
  Bisulfite Padlock Probe
  misc_feature 93, 94, 95, 96, 97, 98: n = A,T,C or G
gactggaagagcactgttaccgcttaaccctaatactttccaacgttggaggctcatcgttcctattcaggcagatgttatcgaggtccgacnnnnnntcaacaaactaaaataaataacgaaatcgatcggatacgcatgaggct

SEQ ID NO: 2687 - DNA, 146 bp, Artificial Sequence
  Bisulfite Padlock Probe
  misc_feature 93, 94, 95, 96, 97, 98: n = A,T,C or G
gactggaagagcactgttaccgtaaaacttaaactcgcaaaaaagttggaggctcatcgttcctattcaggcagatgttatcgaggtccgacnnnnnntcattattactcaaatcaaactcccaccgatcggatacgcatgaggct

SEQ ID NO: 2688 - DNA, 146 bp, Artificial Sequence
  Bisulfite Padlock Probe
  misc_feature 93, 94, 95, 96, 97, 98: n = A,T,C or G
gactggaagagcactgttaccgtaaaacttaaactcgcgaaaaagttggaggctcatcgttcctattcaggcagatgttatcgaggtccgacnnnnnntcattattactcgaatcaaactcccaccgatcggatacgcatgaggct

SEQ ID NO: 2689 - DNA, 146 bp, Artificial Sequence
  Bisulfite Padlock Probe
  misc_feature 92, 93, 94, 95, 96, 97: n = A,T,C or G
gactggaagagcactgttaccgtaaataaacaaacctacacccgttggaggctcatcgttcctattcaggcagatgttatcgaggtccgacnnnnnntcctcaaaaaccgacaaaacgaactcctcgatcggatacgcatgaggct

SEQ ID NO: 2690 - DNA, 146 bp, Artificial Sequence
  Bisulfite Padlock Probe
  misc_feature 92, 93, 94, 95, 96, 97: n = A,T,C or G
gactggaagagcactgttaccgtaaatcgccttccctaaccaagttggaggctcatcgttcctattcaggcagatgttatcgaggtccgacnnnnnnccccaaaacaaaaccctatcaaacccaatgatcggatacgcatgaggct

SEQ ID NO: 2691 - DNA, 146 bp, Artificial Sequence
  Bisulfite Padlock Probe
  misc_feature 92, 93, 94, 95, 96, 97: n = A,T,C or G
gactggaagagcactgttaccgtaaatcgccttccctaaccgagttggaggctcatcgttcctattcaggcagatgttatcgaggtccgacnnnnnnccccaaaacaaaaccctatcaaacccaatgatcggatacgcatgaggct

SEQ ID NO: 2692 - DNA, 146 bp, Artificial Sequence
  Bisulfite Padlock Probe
  misc_feature 96, 97, 98, 99, 100, 101: n = A,T,C or G
gactggaagagcactgttaccgtaatataaataacaatactaataacgttggaggctcatcgttcctattcaggcagatgttatcgaggtccgacnnnnnnaatctacccacatactaataccgtcgatcggatacgcatgaggct

SEQ ID NO: 2693 - DNA, 146 bp, Artificial Sequence
  Bisulfite Padlock Probe
  misc_feature 93, 94, 95, 96, 97, 98: n = A,T,C or G
gactggaagagcactgttaccgtaccccgccgaaatacataaaagttggaggctcatcgttcctattcaggcagatgttatcgaggtccgacnnnnnnacaaaactctccccgaaacataataccagatcggatacgcatgaggct

SEQ ID NO: 2694 - DNA, 146 bp, Artificial Sequence
  Bisulfite Padlock Probe
  misc_feature 93, 94, 95, 96, 97, 98: n = A,T,C or G
gactggaagagcactgttaccgtaccccgccgaaatacgtaaaagttggaggctcatcgttcctattcaggcagatgttatcgaggtccgacnnnnnnacaaaactctccccgaaacataataccggatcggatacgcatgaggct

SEQ ID NO: 2695 - DNA, 146 bp, Artificial Sequence
  Bisulfite Padlock Probe
  misc_feature 92, 93, 94, 95, 96, 97: n = A,T,C or G
gactggaagagcactgttaccgtctctatcgccatccaaaaaagttggaggctcatcgttcctattcaggcagatgttatcgaggtccgacnnnnnnaatccaaatcccaaaacccaccttaaaaagatcggatacgcatgaggct

SEQ ID NO: 2696 - DNA, 146 bp, Artificial Sequence
  Bisulfite Padlock Probe
  misc_feature 92, 93, 94, 95, 96, 97: n = A,T,C or G
gactggaagagcactgttaccgtctctatcgccatccgaaaaagttggaggctcatcgttcctattcaggcagatgttatcgaggtccgacnnnnnnaatccaaatcccaaaacccaccttaaaaagatcggatacgcatgaggct

SEQ ID NO: 2697 - DNA, 146 bp, Artificial Sequence
  Bisulfite Padlock Probe
  misc_feature 93, 94, 95, 96, 97, 98: n = A,T,C or G
gactggaagagcactgttaccgttaatacgcttcaaccaaaaacgttggaggctcatcgttcctattcaggcagatgttatcgaggtccgacnnnnnnctacgtaactctccaactacataaaaacgatcggatacgcatgaggct

SEQ ID NO: 2698 - DNA, 146 bp, Artificial Sequence
  Bisulfite Padlock Probe
  misc_feature 93, 94, 95, 96, 97, 98: n = A,T,C or G
gactggaagagcactgttaccgttaatacgcttcgaccaaaaacgttggaggctcatcgttcctattcaggcagatgttatcgaggtccgacnnnnnnctacgtaactctccaactacgtaaaaacgatcggatacgcatgaggct

SEQ ID NO: 2699 - DNA, 146 bp, Artificial Sequence
  Bisulfite Padlock Probe
  misc_feature 92, 93, 94, 95, 96, 97: n = A,T,C or G
gactggaagagcactgttacctaaaaacaaaaataacttaaaagttggaggctcatcgttcctattcaggcagatgttatcgaggtccgacnnnnnnaaaaacaaaaattacatctaaacaaaaatgatcggatacgcatgaggct

SEQ ID NO: 2700 - DNA, 146 bp, Artificial Sequence
  Bisulfite Padlock Probe
  misc_feature 96, 97, 98, 99, 100, 101: n = A,T,C or G
gactggaagagcactgttacctaaaaacaaaaatcccgaacaaatacgttggaggctcatcgttcctattcaggcagatgttatcgaggtccgacnnnnnncgaaacaacccctaaacaaaaccccgatcggatacgcatgaggct

SEQ ID NO: 2701 - DNA, 146 bp, Artificial Sequence
  Bisulfite Padlock Probe
  misc_feature 96, 97, 98, 99, 100, 101: n = A,T,C or G
gactggaagagcactgttacctaaaaacaaaaatcccgaacgaatacgttggaggctcatcgttcctattcaggcagatgttatcgaggtccgacnnnnnncgaaacgacccctaaacaaaaccccgatcggatacgcatgaggct

SEQ ID NO: 2702 - DNA, 146 bp, Artificial Sequence
  Bisulfite Padlock Probe
  misc_feature 92, 93, 94, 95, 96, 97: n = A,T,C or G
gactggaagagcactgttacctaaaaaccaaaccttcaccctcgttggaggctcatcgttcctattcaggcagatgttatcgaggtccgacnnnnnncacctctctcacaaccaacgaacaaaacagatcggatacgcatgaggct

SEQ ID NO: 2703 - DNA, 146 bp, Artificial Sequence
  Bisulfite Padlock Probe
  misc_feature 92, 93, 94, 95, 96, 97: n = A,T,C or G
gactggaagagcactgttacctaaaaaccaaaccttcgccctcgttggaggctcatcgttcctattcaggcagatgttatcgaggtccgacnnnnnncacctctctcacaaccaacgaacgaaacagatcggatacgcatgaggct

SEQ ID NO: 2704 - DNA, 146 bp, Artificial Sequence
  Bisulfite Padlock Probe
  misc_feature 96, 97, 98, 99, 100, 101: n = A,T,C or G
gactggaagagcactgttacctaaaaacctaactacaaaactcaaacgttggaggctcatcgttcctattcaggcagatgttatcgaggtccgacnnnnnnaccccttctccccaaccaataaaccgatcggatacgcatgaggct

SEQ ID NO: 2705 - DNA, 146 bp, Artificial Sequence
  Bisulfite Padlock Probe
  misc_feature 96, 97, 98, 99, 100, 101: n = A,T,C or G
gactggaagagcactgttacctaaaaacctaactacaaaactcgaacgttggaggctcatcgttcctattcaggcagatgttatcgaggtccgacnnnnnnaccccttctccccgaccaataaaccgatcggatacgcatgaggct

SEQ ID NO: 2706 - DNA, 146 bp, Artificial Sequence
  Bisulfite Padlock Probe
  misc_feature 92, 93, 94, 95, 96, 97: n = A,T,C or G
gactggaagagcactgttacctaaaaacgaaaataacttaaaagttggaggctcatcgttcctattcaggcagatgttatcgaggtccgacnnnnnnaaaaacaaaaattacatctaaacaaaaatgatcggatacgcatgaggct

SEQ ID NO: 2707 - DNA, 146 bp, Artificial Sequence
  Bisulfite Padlock Probe
  misc_feature 93, 94, 95, 96, 97, 98: n = A,T,C or G
gactggaagagcactgttacctaaaacacaactatctttaaaaagttggaggctcatcgttcctattcaggcagatgttatcgaggtccgacnnnnnntatcaccccattcctcaactatatcttcgatcggatacgcatgaggct

SEQ ID NO: 2708 - DNA, 146 bp, Artificial Sequence
  Bisulfite Padlock Probe
  misc_feature 93, 94, 95, 96, 97, 98: n = A,T,C or G
gactggaagagcactgttacctaaaacacaactatctttaaaaagttggaggctcatcgttcctattcaggcagatgttatcgaggtccgacnnnnnntatcaccccgttcctcaactatatcttcgatcggatacgcatgaggct

SEQ ID NO: 2709 - DNA, 146 bp, Artificial Sequence
  Bisulfite Padlock Probe
  misc_feature 93, 94, 95, 96, 97, 98: n = A,T,C or G
gactggaagagcactgttacctaaaaccgttaacctcaaattctgttggaggctcatcgttcctattcaggcagatgttatcgaggtccgacnnnnnnaaaacacataaaaattaaaaataacctcgatcggatacgcatgaggct

SEQ ID NO: 2710 - DNA, 146 bp, Artificial Sequence
  Bisulfite Padlock Probe
  misc_feature 93, 94, 95, 96, 97, 98: n = A,T,C or G
gactggaagagcactgttacctaaaaccgttaacctcgaattctgttggaggctcatcgttcctattcaggcagatgttatcgaggtccgacnnnnnnaaaacacgtaaaaattaaaaataacctcgatcggatacgcatgaggct

SEQ ID NO: 2711 - DNA, 146 bp, Artificial Sequence
  Bisulfite Padlock Probe
  misc_feature 94, 95, 96, 97, 98, 99: n = A,T,C or G
gactggaagagcactgttacctaaaacctaactaaacccacccacgttggaggctcatcgttcctattcaggcagatgttatcgaggtccgacnnnnnnacctccgccaaacaactaatcctaaacgatcggatacgcatgaggct

SEQ ID NO: 2712 - DNA, 146 bp, Artificial Sequence
  Bisulfite Padlock Probe
  misc_feature 94, 95, 96, 97, 98, 99: n = A,T,C or G
gactggaagagcactgttacctaaaacctaactaaacccacccacgttggaggctcatcgttcctattcaggcagatgttatcgaggtccgacnnnnnnacctccgccgaacaactaatcctaaacgatcggatacgcatgaggct

SEQ ID NO: 2713 - DNA, 146 bp, Artificial Sequence
  Bisulfite Padlock Probe
  misc_feature 95, 96, 97, 98, 99, 100: n = A,T,C or G
gactggaagagcactgttacctaaaacgtaaaaacaacactcctccgttggaggctcatcgttcctattcaggcagatgttatcgaggtccgacnnnnnnccctactcctcatacctttaataaacgatcggatacgcatgaggct

SEQ ID NO: 2714 - DNA, 146 bp, Artificial Sequence
  Bisulfite Padlock Probe
  misc_feature 95, 96, 97, 98, 99, 100: n = A,T,C or G
gactggaagagcactgttacctaaaacgtaaaaacaacgctcctccgttggaggctcatcgttcctattcaggcagatgttatcgaggtccgacnnnnnnccctactcctcgtacctttaataaacgatcggatacgcatgaggct

SEQ ID NO: 2715 - DNA, 146 bp, Artificial Sequence
  Bisulfite Padlock Probe
  misc_feature 96, 97, 98, 99, 100, 101: n = A,T,C or G
gactggaagagcactgttacctaaaataacccaatcctccaaatacagttggaggctcatcgttcctattcaggcagatgttatcgaggtccgacnnnnnncaccaccaattttcccacttccaccgatcggatacgcatgaggct

SEQ ID NO: 2716 - DNA, 146 bp, Artificial Sequence
  Bisulfite Padlock Probe
  misc_feature 96, 97, 98, 99, 100, 101: n = A,T,C or G
gactggaagagcactgttacctaaaataacccgatcctccaaatacagttggaggctcatcgttcctattcaggcagatgttatcgaggtccgacnnnnnncaccaccaattttcccacttccgccgatcggatacgcatgaggct

SEQ ID NO: 2717 - DNA, 146 bp, Artificial Sequence
  Bisulfite Padlock Probe
  misc_feature 95, 96, 97, 98, 99, 100: n = A,T,C or G
gactggaagagcactgttacctaaaatatatctaaaccccaactccgttggaggctcatcgttcctattcaggcagatgttatcgaggtccgacnnnnnnaaatttaacacctccgacgacaaaacgatcggatacgcatgaggct

SEQ ID NO: 2718 - DNA, 146 bp, Artificial Sequence
  Bisulfite Padlock Probe
  misc_feature 95, 96, 97, 98, 99, 100: n = A,T,C or G
gactggaagagcactgttacctaaaatatatctaaaccccgactccgttggaggctcatcgttcctattcaggcagatgttatcgaggtccgacnnnnnnaaatttaacacctccgacgacgaaacgatcggatacgcatgaggct

SEQ ID NO: 2719 - DNA, 146 bp, Artificial Sequence
  Bisulfite Padlock Probe
  misc_feature 95, 96, 97, 98, 99, 100: n = A,T,C or G
gactggaagagcactgttacctaaaccgaacgctacgaacaaaaccgttggaggctcatcgttcctattcaggcagatgttatcgaggtccgacnnnnnnaaaaaccgaaaaatcgaaaacaaaacgatcggatacgcatgaggct

SEQ ID NO: 2720 - DNA, 146 bp, Artificial Sequence
  Bisulfite Padlock Probe
  misc_feature 95, 96, 97, 98, 99, 100: n = A,T,C or G
gactggaagagcactgttacctaaaccgaacgctacgaacgaaaccgttggaggctcatcgttcctattcaggcagatgttatcgaggtccgacnnnnnnaaaaaccgaaaaatcgaaaacgaaacgatcggatacgcatgaggct

SEQ ID NO: 2721 - DNA, 146 bp, Artificial Sequence
  Bisulfite Padlock Probe
  misc_feature 94, 95, 96, 97, 98, 99: n = A,T,C or G
gactggaagagcactgttacctaaacgaaacgcaaaaccaaaaacgttggaggctcatcgttcctattcaggcagatgttatcgaggtccgacnnnnnnaattcacaaacctattccaatccactcgatcggatacgcatgaggct

SEQ ID NO: 2722 - DNA, 146 bp, Artificial Sequence
  Bisulfite Padlock Probe
  misc_feature 94, 95, 96, 97, 98, 99: n = A,T,C or G
gactggaagagcactgttacctaaacgaaacgcgaaaccaaaaacgttggaggctcatcgttcctattcaggcagatgttatcgaggtccgacnnnnnnaattcacaaacctattccgatccactcgatcggatacgcatgaggct

SEQ ID NO: 2723 - DNA, 146 bp, Artificial Sequence
  Bisulfite Padlock Probe
  misc_feature 96, 97, 98, 99, 100, 101: n = A,T,C or G
gactggaagagcactgttacctaaacttaaccaacaaccaatacaaagttggaggctcatcgttcctattcaggcagatgttatcgaggtccgacnnnnnnaaaaaccgctttcctctaccacctagatcggatacgcatgaggct

SEQ ID NO: 2724 - DNA, 146 bp, Artificial Sequence
  Bisulfite Padlock Probe
  misc_feature 96, 97, 98, 99, 100, 101: n = A,T,C or G
gactggaagagcactgttacctaaacttaaccaacgaccaatacaaagttggaggctcatcgttcctattcaggcagatgttatcgaggtccgacnnnnnnaaaaaccgctttcctctaccgcctagatcggatacgcatgaggct

SEQ ID NO: 2725 - DNA, 146 bp, Artificial Sequence
  Bisulfite Padlock Probe
  misc_feature 92, 93, 94, 95, 96, 97: n = A,T,C or G
gactggaagagcactgttacctaaacttacctacccctacaaagttggaggctcatcgttcctattcaggcagatgttatcgaggtccgacnnnnnnaaccctctaaattaacccccactccttacgatcggatacgcatgaggct

SEQ ID NO: 2726 - DNA, 146 bp, Artificial Sequence
  Bisulfite Padlock Probe
  misc_feature 92, 93, 94, 95, 96, 97: n = A,T,C or G
gactggaagagcactgttacctaaacttacctacccctacgaagttggaggctcatcgttcctattcaggcagatgttatcgaggtccgacnnnnnnaaccctctaaattaacccccactccttacgatcggatacgcatgaggct

SEQ ID NO: 2727 - DNA, 146 bp, Artificial Sequence
  Bisulfite Padlock Probe
  misc_feature 92, 93, 94, 95, 96, 97: n = A,T,C or G
gactggaagagcactgttacctaacctcctcaaaatccaaaacgttggaggctcatcgttcctattcaggcagatgttatcgaggtccgacnnnnnntaataacctctaaccctctaaaacccaacgatcggatacgcatgaggct

SEQ ID NO: 2728 - DNA, 146 bp, Artificial Sequence
  Bisulfite Padlock Probe
  misc_feature 92, 93, 94, 95, 96, 97: n = A,T,C or G
gactggaagagcactgttacctaacctcctcgaaatccaaaacgttggaggctcatcgttcctattcaggcagatgttatcgaggtccgacnnnnnntaataacctctaaccctctaaaacccaacgatcggatacgcatgaggct

SEQ ID NO: 2729 - DNA, 146 bp, Artificial Sequence
  Bisulfite Padlock Probe
  misc_feature 94, 95, 96, 97, 98, 99: n = A,T,C or G
gactggaagagcactgttacctaatactactcacctacttcctacgttggaggctcatcgttcctattcaggcagatgttatcgaggtccgacnnnnnnctctaacaaccaactaaccatacccccgatcggatacgcatgaggct

SEQ ID NO: 2730 - DNA, 146 bp, Artificial Sequence
  Bisulfite Padlock Probe
  misc_feature 94, 95, 96, 97, 98, 99: n = A,T,C or G
gactggaagagcactgttacctaatactactcgcctacttcctacgttggaggctcatcgttcctattcaggcagatgttatcgaggtccgacnnnnnnctctaacaaccaactaaccgtacccccgatcggatacgcatgaggct

SEQ ID NO: 2731 - DNA, 146 bp, Artificial Sequence
  Bisulfite Padlock Probe
  misc_feature 92, 93, 94, 95, 96, 97: n = A,T,C or G
gactggaagagcactgttacctacacttcccaacaaataaaaagttggaggctcatcgttcctattcaggcagatgttatcgaggtccgacnnnnnnaaaaactcctcgacacaaaccgcaaaaaagatcggatacgcatgaggct

SEQ ID NO: 2732 - DNA, 146 bp, Artificial Sequence
  Bisulfite Padlock Probe
  misc_feature 94, 95, 96, 97, 98, 99: n = A,T,C or G
gactggaagagcactgttacctaccataaccaccatcccaaaatcgttggaggctcatcgttcctattcaggcagatgttatcgaggtccgacnnnnnnaacaacactttttacacaatctaaaacgatcggatacgcatgaggct

SEQ ID NO: 2733 - DNA, 146 bp, Artificial Sequence
  Bisulfite Padlock Probe
  misc_feature 94, 95, 96, 97, 98, 99: n = A,T,C or G
gactggaagagcactgttacctaccataaccaccgtcccaaaatcgttggaggctcatcgttcctattcaggcagatgttatcgaggtccgacnnnnnnaacaacactttttacacaatctaaaacgatcggatacgcatgaggct

SEQ ID NO: 2734 - DNA, 146 bp, Artificial Sequence
  Bisulfite Padlock Probe
  misc_feature 95, 96, 97, 98, 99, 100: n = A,T,C or G
gactggaagagcactgttacctaccgtaccacctacaaaaatcaaagttggaggctcatcgttcctattcaggcagatgttatcgaggtccgacnnnnnnaaactaaaccccttcgcacccaaacagatcggatacgcatgaggct

SEQ ID NO: 2735 - DNA, 146 bp, Artificial Sequence
  Bisulfite Padlock Probe
  misc_feature 95, 96, 97, 98, 99, 100: n = A,T,C or G
gactggaagagcactgttacctaccgtaccacctacaaaaatcgaagttggaggctcatcgttcctattcaggcagatgttatcgaggtccgacnnnnnnaaactaaaccccttcgcacccgaacagatcggatacgcatgaggct

SEQ ID NO: 2736 - DNA, 146 bp, Artificial Sequence
  Bisulfite Padlock Probe
  misc_feature 96, 97, 98, 99, 100, 101: n = A,T,C or G
gactggaagagcactgttacctacgcataacactacaaatctaaaaagttggaggctcatcgttcctattcaggcagatgttatcgaggtccgacnnnnnnctctctacaaacactaactactaacgatcggatacgcatgaggct

SEQ ID NO: 2737 - DNA, 146 bp, Artificial Sequence
  Bisulfite Padlock Probe
  misc_feature 96, 97, 98, 99, 100, 101: n = A,T,C or G
gactggaagagcactgttacctacgcataacactacgaatctaaaaagttggaggctcatcgttcctattcaggcagatgttatcgaggtccgacnnnnnnctctctacaaacgctaactactaacgatcggatacgcatgaggct

SEQ ID NO: 2738 - DNA, 146 bp, Artificial Sequence
  Bisulfite Padlock Probe
  misc_feature 93, 94, 95, 96, 97, 98: n = A,T,C or G
gactggaagagcactgttacctacgcctaaaacccgacaaaaaagttggaggctcatcgttcctattcaggcagatgttatcgaggtccgacnnnnnnccccaatacaaacccttcataaataaccgatcggatacgcatgaggct

SEQ ID NO: 2739 - DNA, 146 bp, Artificial Sequence
  Bisulfite Padlock Probe
  misc_feature 93, 94, 95, 96, 97, 98: n = A,T,C or G
gactggaagagcactgttacctacgcctaaaacccgacgaaaaagttggaggctcatcgttcctattcaggcagatgttatcgaggtccgacnnnnnnccccaatacaaacccttcgtaaataaccgatcggatacgcatgaggct

SEQ ID NO: 2740 - DNA, 146 bp, Artificial Sequence
  Bisulfite Padlock Probe
  misc_feature 92, 93, 94, 95, 96, 97: n = A,T,C or G
gactggaagagcactgttacctacgcttcccaacaaataaaaagttggaggctcatcgttcctattcaggcagatgttatcgaggtccgacnnnnnnaaaaactcctcgacacaaaccgcgaaaaagatcggatacgcatgaggct

SEQ ID NO: 2741 - DNA, 146 bp, Artificial Sequence
  Bisulfite Padlock Probe
  misc_feature 92, 93, 94, 95, 96, 97: n = A,T,C or G
gactggaagagcactgttacctactaaaacatttccacctaacgttggaggctcatcgttcctattcaggcagatgttatcgaggtccgacnnnnnnctaaccgactaccacgaatacacaacctagatcggatacgcatgaggct

SEQ ID NO: 2742 - DNA, 146 bp, Artificial Sequence
  Bisulfite Padlock Probe
  misc_feature 92, 93, 94, 95, 96, 97: n = A,T,C or G
gactggaagagcactgttacctactaaaacatttccgcctaacgttggaggctcatcgttcctattcaggcagatgttatcgaggtccgacnnnnnnctaaccgactaccacgaatacacgacctagatcggatacgcatgaggct

SEQ ID NO: 2743 - DNA, 146 bp, Artificial Sequence
  Bisulfite Padlock Probe
  misc_feature 94, 95, 96, 97, 98, 99: n = A,T,C or G
gactggaagagcactgttacctactaacactccccacctacacacgttggaggctcatcgttcctattcaggcagatgttatcgaggtccgacnnnnnnaaccacaacaacaactcaacccaaaacgatcggatacgcatgaggct

SEQ ID NO: 2744 - DNA, 146 bp, Artificial Sequence
  Bisulfite Padlock Probe
  misc_feature 94, 95, 96, 97, 98, 99: n = A,T,C or G
gactggaagagcactgttacctactaacactccccacctacgcacgttggaggctcatcgttcctattcaggcagatgttatcgaggtccgacnnnnnnaaccacaacgacaactcaacccaaaacgatcggatacgcatgaggct

SEQ ID NO: 2745 - DNA, 146 bp, Artificial Sequence
  Bisulfite Padlock Probe
  misc_feature 92, 93, 94, 95, 96, 97: n = A,T,C or G
gactggaagagcactgttacctactatacctaaaattcccaaagttggaggctcatcgttcctattcaggcagatgttatcgaggtccgacnnnnnnaaaaatactccgactaaacatatctaaaagatcggatacgcatgaggct

SEQ ID NO: 2746 - DNA, 146 bp, Artificial Sequence
  Bisulfite Padlock Probe
  misc_feature 92, 93, 94, 95, 96, 97: n = A,T,C or G
gactggaagagcactgttacctactatacctaaaattcccaaagttggaggctcatcgttcctattcaggcagatgttatcgaggtccgacnnnnnnaaaaatactccgactaaacgtatctaaaagatcggatacgcatgaggct

SEQ ID NO: 2747 - DNA, 146 bp, Artificial Sequence
  Bisulfite Padlock Probe
  misc_feature 92, 93, 94, 95, 96, 97: n = A,T,C or G
gactggaagagcactgttacctataaaattaacgatacaactagttggaggctcatcgttcctattcaggcagatgttatcgaggtccgacnnnnnnaaataaacgcgaccgcatctaattataacgatcggatacgcatgaggct

SEQ ID NO: 2748 - DNA, 146 bp, Artificial Sequence
  Bisulfite Padlock Probe
  misc_feature 92, 93, 94, 95, 96, 97: n = A,T,C or G
gactggaagagcactgttacctataaaattaacgatacgactagttggaggctcatcgttcctattcaggcagatgttatcgaggtccgacnnnnnnaaataaacgcgaccgcgtctaattataacgatcggatacgcatgaggct

SEQ ID NO: 2749 - DNA, 146 bp, Artificial Sequence
  Bisulfite Padlock Probe
  misc_feature 94, 95, 96, 97, 98, 99: n = A,T,C or G
gactggaagagcactgttacctataaacgcgacaaccaccaacacgttggaggctcatcgttcctattcaggcagatgttatcgaggtccgacnnnnnnaaactacgcgaacccaaccacctaaacgatcggatacgcatgaggct

SEQ ID NO: 2750 - DNA, 146 bp, Artificial Sequence
  Bisulfite Padlock Probe
  misc_feature 94, 95, 96, 97, 98, 99: n = A,T,C or G
gactggaagagcactgttacctataaacgcgacaaccaccgacacgttggaggctcatcgttcctattcaggcagatgttatcgaggtccgacnnnnnnaaactacgcgaacccgaccacctaaacgatcggatacgcatgaggct

SEQ ID NO: 2751 - DNA, 146 bp, Artificial Sequence
  Bisulfite Padlock Probe
  misc_feature 95, 96, 97, 98, 99, 100: n = A,T,C or G
gactggaagagcactgttacctatatatttatcaaaacctaaaatagttggaggctcatcgttcctattcaggcagatgttatcgaggtccgacnnnnnncccgacttcccgcccaaatacatatcgatcggatacgcatgaggct

SEQ ID NO: 2752 - DNA, 146 bp, Artificial Sequence
  Bisulfite Padlock Probe
  misc_feature 95, 96, 97, 98, 99, 100: n = A,T,C or G
gactggaagagcactgttacctatatatttatcgaaacctaaaatagttggaggctcatcgttcctattcaggcagatgttatcgaggtccgacnnnnnncccgacttcccgcccaaatacgtatcgatcggatacgcatgaggct

SEQ ID NO: 2753 - DNA, 146 bp, Artificial Sequence
  Bisulfite Padlock Probe
  misc_feature 94, 95, 96, 97, 98, 99: n = A,T,C or G
gactggaagagcactgttacctatatttattacaaaacccctaacgttggaggctcatcgttcctattcaggcagatgttatcgaggtccgacnnnnnnaaaaacaacctactactaacactactagatcggatacgcatgaggct

SEQ ID NO: 2754 - DNA, 146 bp, Artificial Sequence
  Bisulfite Padlock Probe
  misc_feature 94, 95, 96, 97, 98, 99: n = A,T,C or G
gactggaagagcactgttacctatatttattacaaaacccctaacgttggaggctcatcgttcctattcaggcagatgttatcgaggtccgacnnnnnnaaaaacgacctactactaacactactagatcggatacgcatgaggct

SEQ ID NO: 2755 - DNA, 146 bp, Artificial Sequence
  Bisulfite Padlock Probe
  misc_feature 95, 96, 97, 98, 99, 100: n = A,T,C or G
gactggaagagcactgttacctcaaaactaacacactacctcctccgttggaggctcatcgttcctattcaggcagatgttatcgaggtccgacnnnnnncctcaataaatatttaataaataaaagatcggatacgcatgaggct

SEQ ID NO: 2756 - DNA, 146 bp, Artificial Sequence
  Bisulfite Padlock Probe
  misc_feature 95, 96, 97, 98, 99, 100: n = A,T,C or G
gactggaagagcactgttacctcaaaactaacgcactacctcctccgttggaggctcatcgttcctattcaggcagatgttatcgaggtccgacnnnnnncctcgataaatatttaataaataaaagatcggatacgcatgaggct

SEQ ID NO: 2757 - DNA, 146 bp, Artificial Sequence
  Bisulfite Padlock Probe
  misc_feature 94, 95, 96, 97, 98, 99: n = A,T,C or G
gactggaagagcactgttacctcaaaactcaattttctaaccaacgttggaggctcatcgttcctattcaggcagatgttatcgaggtccgacnnnnnnaaaactaaaccacgacctcaaaaccttgatcggatacgcatgaggct

SEQ ID NO: 2758 - DNA, 146 bp, Artificial Sequence
  Bisulfite Padlock Probe
  misc_feature 92, 93, 94, 95, 96, 97: n = A,T,C or G
gactggaagagcactgttacctcaaaatcacactccatcaaaagttggaggctcatcgttcctattcaggcagatgttatcgaggtccgacnnnnnnatatatcccaataaatccctaataaactcgatcggatacgcatgaggct

SEQ ID NO: 2759 - DNA, 146 bp, Artificial Sequence
  Bisulfite Padlock Probe
  misc_feature 92, 93, 94, 95, 96, 97: n = A,T,C or G
gactggaagagcactgttacctcaaaatcacactccatcaaaagttggaggctcatcgttcctattcaggcagatgttatcgaggtccgacnnnnnnatatatcccgataaatccctaataaactcgatcggatacgcatgaggct

SEQ ID NO: 2760 - DNA, 146 bp, Artificial Sequence
  Bisulfite Padlock Probe
  misc_feature 95, 96, 97, 98, 99, 100: n = A,T,C or G
gactggaagagcactgttacctcaacacctcctacccctactactagttggaggctcatcgttcctattcaggcagatgttatcgaggtccgacnnnnnnaacgaaacctccatcctatccccaaagatcggatacgcatgaggct

SEQ ID NO: 2761 - DNA, 146 bp, Artificial Sequence
  Bisulfite Padlock Probe
  misc_feature 95, 96, 97, 98, 99, 100: n = A,T,C or G
gactggaagagcactgttacctcaacgcctcctacccctactactagttggaggctcatcgttcctattcaggcagatgttatcgaggtccgacnnnnnnaacgaaacctccatcctatccccgaagatcggatacgcatgaggct

SEQ ID NO: 2762 - DNA, 146 bp, Artificial Sequence
  Bisulfite Padlock Probe
  misc_feature 92, 93, 94, 95, 96, 97: n = A,T,C or G
gactggaagagcactgttacctcacgtccgaccccaaaaatacgttggaggctcatcgttcctattcaggcagatgttatcgaggtccgacnnnnnnaaaaacaaccacttttaaaataacttcacgatcggatacgcatgaggct

SEQ ID NO: 2763 - DNA, 146 bp, Artificial Sequence
  Bisulfite Padlock Probe
  misc_feature 92, 93, 94, 95, 96, 97: n = A,T,C or G
gactggaagagcactgttacctcacgtccgaccccgaaaatacgttggaggctcatcgttcctattcaggcagatgttatcgaggtccgacnnnnnnaaaaacaaccacttttaaaataacttcgcgatcggatacgcatgaggct

SEQ ID NO: 2764 - DNA, 146 bp, Artificial Sequence
  Bisulfite Padlock Probe
  misc_feature 95, 96, 97, 98, 99, 100: n = A,T,C or G
gactggaagagcactgttacctccaacaactctacaaaccccaaatgttggaggctcatcgttcctattcaggcagatgttatcgaggtccgacnnnnnncaaaaaccccgaacgactaaacaaccgatcggatacgcatgaggct

SEQ ID NO: 2765 - DNA, 146 bp, Artificial Sequence
  Bisulfite Padlock Probe
  misc_feature 95, 96, 97, 98, 99, 100: n = A,T,C or G
gactggaagagcactgttacctccaacaactctacgaaccccaaatgttggaggctcatcgttcctattcaggcagatgttatcgaggtccgacnnnnnncaaaaaccccgaacgactaaacgaccgatcggatacgcatgaggct

SEQ ID NO: 2766 - DNA, 146 bp, Artificial Sequence
  Bisulfite Padlock Probe
  misc_feature 92, 93, 94, 95, 96, 97: n = A,T,C or G
gactggaagagcactgttacctccacatccacccacatctaacgttggaggctcatcgttcctattcaggcagatgttatcgaggtccgacnnnnnnaaacccacaaaccaaaatcctacctaccagatcggatacgcatgaggct

SEQ ID NO: 2767 - DNA, 146 bp, Artificial Sequence
  Bisulfite Padlock Probe
  misc_feature 92, 93, 94, 95, 96, 97: n = A,T,C or G
gactggaagagcactgttacctccacatccgcccacatctaacgttggaggctcatcgttcctattcaggcagatgttatcgaggtccgacnnnnnnaaacccacaaaccgaaatcctacctaccagatcggatacgcatgaggct

SEQ ID NO: 2768 - DNA, 146 bp, Artificial Sequence
  Bisulfite Padlock Probe
  misc_feature 94, 95, 96, 97, 98, 99: n = A,T,C or G
gactggaagagcactgttacctcccaataaatcccccaataacccgttggaggctcatcgttcctattcaggcagatgttatcgaggtccgacnnnnnnctccaactcatacaccttaaccaaaaagatcggatacgcatgaggct

SEQ ID NO: 2769 - DNA, 146 bp, Artificial Sequence
  Bisulfite Padlock Probe
  misc_feature 92, 93, 94, 95, 96, 97: n = A,T,C or G
gactggaagagcactgttacctccctaaacgccgaatacacaagttggaggctcatcgttcctattcaggcagatgttatcgaggtccgacnnnnnnataaaaaccgctactttcccgccaaaaacgatcggatacgcatgaggct

SEQ ID NO: 2770 - DNA, 146 bp, Artificial Sequence
  Bisulfite Padlock Probe
  misc_feature 92, 93, 94, 95, 96, 97: n = A,T,C or G
gactggaagagcactgttacctccctaaacgccgaatacgcaagttggaggctcatcgttcctattcaggcagatgttatcgaggtccgacnnnnnnataaaaaccgctactttcccgccgaaaacgatcggatacgcatgaggct

SEQ ID NO: 2771 - DNA, 146 bp, Artificial Sequence
  Bisulfite Padlock Probe
  misc_feature 93, 94, 95, 96, 97, 98: n = A,T,C or G
gactggaagagcactgttacctccgtccaaaaccacaaacttaagttggaggctcatcgttcctattcaggcagatgttatcgaggtccgacnnnnnnctacccaaaaattcccttcccacaactcgatcggatacgcatgaggct

SEQ ID NO: 2772 - DNA, 146 bp, Artificial Sequence
  Bisulfite Padlock Probe
  misc_feature 93, 94, 95, 96, 97, 98: n = A,T,C or G
gactggaagagcactgttacctccgtccaaaaccgcaaacttaagttggaggctcatcgttcctattcaggcagatgttatcgaggtccgacnnnnnnctacccaaaaattcccttcccgcaactcgatcggatacgcatgaggct

SEQ ID NO: 2773 - DNA, 146 bp, Artificial Sequence
  Bisulfite Padlock Probe
  misc_feature 92, 93, 94, 95, 96, 97: n = A,T,C or G
gactggaagagcactgttacctcctctaatttcacacccaaccgttggaggctcatcgttcctattcaggcagatgttatcgaggtccgacnnnnnnccaataactctcaaatttatacataacttgatcggatacgcatgaggct

SEQ ID NO: 2774 - DNA, 146 bp, Artificial Sequence
  Bisulfite Padlock Probe
  misc_feature 92, 93, 94, 95, 96, 97: n = A,T,C or G
gactggaagagcactgttacctcctctaatttcacacccaaccgttggaggctcatcgttcctattcaggcagatgttatcgaggtccgacnnnnnnccaataactctcgaatttatacataacttgatcggatacgcatgaggct

SEQ ID NO: 2775 - DNA, 146 bp, Artificial Sequence
  Bisulfite Padlock Probe
  misc_feature 92, 93, 94, 95, 96, 97: n = A,T,C or G
gactggaagagcactgttacctcctctccactacgaacccaacgttggaggctcatcgttcctattcaggcagatgttatcgaggtccgacnnnnnnattaacaccgaaccaacactattcaaaccgatcggatacgcatgaggct

SEQ ID NO: 2776 - DNA, 146 bp, Artificial Sequence
  Bisulfite Padlock Probe
  misc_feature 92, 93, 94, 95, 96, 97: n = A,T,C or G
gactggaagagcactgttacctcctctccactacgaacccgacgttggaggctcatcgttcctattcaggcagatgttatcgaggtccgacnnnnnnattaacaccgaaccaacgctattcaaaccgatcggatacgcatgaggct

SEQ ID NO: 2777 - DNA, 146 bp, Artificial Sequence
  Bisulfite Padlock Probe
  misc_feature 93, 94, 95, 96, 97, 98: n = A,T,C or G
gactggaagagcactgttacctcgaaactaacgacactaaaccagttggaggctcatcgttcctattcaggcagatgttatcgaggtccgacnnnnnnaacaataatctacgtccccaacccaacagatcggatacgcatgaggct

SEQ ID NO: 2778 - DNA, 146 bp, Artificial Sequence
  Bisulfite Padlock Probe
  misc_feature 93, 94, 95, 96, 97, 98: n = A,T,C or G
gactggaagagcactgttacctcgaaactaacgacgctaaaccagttggaggctcatcgttcctattcaggcagatgttatcgaggtccgacnnnnnnaacaataatctacgtccccaacccgacagatcggatacgcatgaggct

SEQ ID NO: 2779 - DNA, 146 bp, Artificial Sequence
  Bisulfite Padlock Probe
  misc_feature 94, 95, 96, 97, 98, 99: n = A,T,C or G
gactggaagagcactgttacctcgaaactaatcgccataataaccgttggaggctcatcgttcctattcaggcagatgttatcgaggtccgacnnnnnnaataaaaacaaaaatactaataaaaacgatcggatacgcatgaggct

SEQ ID NO: 2780 - DNA, 146 bp, Artificial Sequence
  Bisulfite Padlock Probe
  misc_feature 94, 95, 96, 97, 98, 99: n = A,T,C or G
gactggaagagcactgttacctcgaaactaatcgccgtaataaccgttggaggctcatcgttcctattcaggcagatgttatcgaggtccgacnnnnnnaataaaaacaaaaatactaataaaaacgatcggatacgcatgaggct

SEQ ID NO: 2781 - DNA, 146 bp, Artificial Sequence
  Bisulfite Padlock Probe
  misc_feature 94, 95, 96, 97, 98, 99: n = A,T,C or G
gactggaagagcactgttacctcgaaactcaattttctaaccaacgttggaggctcatcgttcctattcaggcagatgttatcgaggtccgacnnnnnnaaaactaaaccacgacctcgaaaccttgatcggatacgcatgaggct

SEQ ID NO: 2782 - DNA, 146 bp, Artificial Sequence
  Bisulfite Padlock Probe
  misc_feature 92, 93, 94, 95, 96, 97: n = A,T,C or G
gactggaagagcactgttacctcgacctaaacttcgacaatacgttggaggctcatcgttcctattcaggcagatgttatcgaggtccgacnnnnnnaaaccccaaaactctacaaactaaacaacgatcggatacgcatgaggct

SEQ ID NO: 2783 - DNA, 146 bp, Artificial Sequence
  Bisulfite Padlock Probe
  misc_feature 92, 93, 94, 95, 96, 97: n = A,T,C or G
gactggaagagcactgttacctcgacctaaacttcgacgatacgttggaggctcatcgttcctattcaggcagatgttatcgaggtccgacnnnnnnaaaccccgaaactctacaaactaaacaacgatcggatacgcatgaggct

SEQ ID NO: 2784 - DNA, 146 bp, Artificial Sequence
  Bisulfite Padlock Probe
  misc_feature 92, 93, 94, 95, 96, 97: n = A,T,C or G
gactggaagagcactgttacctcgatattcgcaaacgcaaaatgttggaggctcatcgttcctattcaggcagatgttatcgaggtccgacnnnnnnacgactacgaactaactctcccaacctacgatcggatacgcatgaggct

SEQ ID NO: 2785 - DNA, 146 bp, Artificial Sequence
  Bisulfite Padlock Probe
  misc_feature 92, 93, 94, 95, 96, 97: n = A,T,C or G
gactggaagagcactgttacctcgatattcgcaaacgcgaaatgttggaggctcatcgttcctattcaggcagatgttatcgaggtccgacnnnnnnacgactacgaactaactctcccgacctacgatcggatacgcatgaggct

SEQ ID NO: 2786 - DNA, 146 bp, Artificial Sequence
  Bisulfite Padlock Probe
  misc_feature 95, 96, 97, 98, 99, 100: n = A,T,C or G
gactggaagagcactgttacctcgcgctactcaataacaaaacaacgttggaggctcatcgttcctattcaggcagatgttatcgaggtccgacnnnnnnccccctacccgaaacaaaactaaaaagatcggatacgcatgaggct

SEQ ID NO: 2787 - DNA, 146 bp, Artificial Sequence
  Bisulfite Padlock Probe
  misc_feature 95, 96, 97, 98, 99, 100: n = A,T,C or G
gactggaagagcactgttacctcgcgctactcaataacgaaacaacgttggaggctcatcgttcctattcaggcagatgttatcgaggtccgacnnnnnnccccctacccgaaacgaaactaaaaagatcggatacgcatgaggct

SEQ ID NO: 2788 - DNA, 146 bp, Artificial Sequence
  Bisulfite Padlock Probe
  misc_feature 93, 94, 95, 96, 97, 98: n = A,T,C or G
gactggaagagcactgttacctctaaaacgcccaaacgaaccatgttggaggctcatcgttcctattcaggcagatgttatcgaggtccgacnnnnnnaaactaaaaaccacaaacctctcacctcgatcggatacgcatgaggct

SEQ ID NO: 2789 - DNA, 146 bp, Artificial Sequence
  Bisulfite Padlock Probe
  misc_feature 93, 94, 95, 96, 97, 98: n = A,T,C or G
gactggaagagcactgttacctctaaaacgcccaaacgaaccgtgttggaggctcatcgttcctattcaggcagatgttatcgaggtccgacnnnnnnaaactaaaaaccacaaacctctcacctcgatcggatacgcatgaggct

SEQ ID NO: 2790 - DNA, 146 bp, Artificial Sequence
  Bisulfite Padlock Probe
  misc_feature 96, 97, 98, 99, 100, 101: n = A,T,C or G
gactggaagagcactgttacctctacgctccgaacgaaaacaatatagttggaggctcatcgttcctattcaggcagatgttatcgaggtccgacnnnnnncccccaaaacaaaaataaacaaaaagatcggatacgcatgaggct

SEQ ID NO: 2791 - DNA, 146 bp, Artificial Sequence
  Bisulfite Padlock Probe
  misc_feature 96, 97, 98, 99, 100, 101: n = A,T,C or G
gactggaagagcactgttacctctacgctccgaacgaaaacgatatagttggaggctcatcgttcctattcaggcagatgttatcgaggtccgacnnnnnncccccaaaacgaaaataaacaaaaagatcggatacgcatgaggct

SEQ ID NO: 2792 - DNA, 146 bp, Artificial Sequence
  Bisulfite Padlock Probe
  misc_feature 94, 95, 96, 97, 98, 99: n = A,T,C or G
gactggaagagcactgttaccttaaaacctcaaaatcactaatacgttggaggctcatcgttcctattcaggcagatgttatcgaggtccgacnnnnnnctcaatttccatcacccaacaaacaccgatcggatacgcatgaggct

SEQ ID NO: 2793 - DNA, 146 bp, Artificial Sequence
  Bisulfite Padlock Probe
  misc_feature 94, 95, 96, 97, 98, 99: n = A,T,C or G
gactggaagagcactgttaccttaaaacctcaaaatcactaatacgttggaggctcatcgttcctattcaggcagatgttatcgaggtccgacnnnnnnctcaatttccatcacccaacaaacgccgatcggatacgcatgaggct

SEQ ID NO: 2794 - DNA, 146 bp, Artificial Sequence
  Bisulfite Padlock Probe
  misc_feature 92, 93, 94, 95, 96, 97: n = A,T,C or G
gactggaagagcactgttaccttatctctaataaattatttttgttggaggctcatcgttcctattcaggcagatgttatcgaggtccgacnnnnnnaaaactaaattaaatctctatatactaaagatcggatacgcatgaggct

SEQ ID NO: 2795 - DNA, 146 bp, Artificial Sequence
  Bisulfite Padlock Probe
  misc_feature 96, 97, 98, 99, 100, 101: n = A,T,C or G
gactggaagagcactgttaccttccatcccaacctctatccttcctagttggaggctcatcgttcctattcaggcagatgttatcgaggtccgacnnnnnncccgatatcaacgcgcaacacattcgatcggatacgcatgaggct

SEQ ID NO: 2796 - DNA, 146 bp, Artificial Sequence
  Bisulfite Padlock Probe
  misc_feature 96, 97, 98, 99, 100, 101: n = A,T,C or G
gactggaagagcactgttaccttccatcccgacctctatccttcctagttggaggctcatcgttcctattcaggcagatgttatcgaggtccgacnnnnnncccgatatcaacgcgcaacacgttcgatcggatacgcatgaggct

SEQ ID NO: 2797 - DNA, 146 bp, Artificial Sequence
  Bisulfite Padlock Probe
  misc_feature 92, 93, 94, 95, 96, 97: n = A,T,C or G
gactggaagagcactgttaccttcccgaaatcccaaacaacacgttggaggctcatcgttcctattcaggcagatgttatcgaggtccgacnnnnnnaaacaaacatcaacttcaatttccaactcgatcggatacgcatgaggct

SEQ ID NO: 2798 - DNA, 146 bp, Artificial Sequence
  Bisulfite Padlock Probe
  misc_feature 92, 93, 94, 95, 96, 97: n = A,T,C or G
gactggaagagcactgttaccttcccgaaatcccgaacaacacgttggaggctcatcgttcctattcaggcagatgttatcgaggtccgacnnnnnnaaacaaacgtcaacttcaatttccaactcgatcggatacgcatgaggct

SEQ ID NO: 2799 - DNA, 146 bp, Artificial Sequence
  Bisulfite Padlock Probe
  misc_feature 93, 94, 95, 96, 97, 98: n = A,T,C or G
gactggaagagcactgttaccttctactctacttttctaactacgttggaggctcatcgttcctattcaggcagatgttatcgaggtccgacnnnnnncaaaataccgaaactaaataccacaaaagatcggatacgcatgaggct

SEQ ID NO: 2800 - DNA, 146 bp, Artificial Sequence
  Bisulfite Padlock Probe
  misc_feature 93, 94, 95, 96, 97, 98: n = A,T,C or G
gactggaagagcactgttaccttctactctacttttctaactacgttggaggctcatcgttcctattcaggcagatgttatcgaggtccgacnnnnnncaaaataccgaaactaaataccgcaaaagatcggatacgcatgaggct

SEQ ID NO: 2801 - DNA, 146 bp, Artificial Sequence
  Bisulfite Padlock Probe
  misc_feature 92, 93, 94, 95, 96, 97: n = A,T,C or G
gactggaagagcactgttacctttacaaccacatccttccctagttggaggctcatcgttcctattcaggcagatgttatcgaggtccgacnnnnnncaactacaacctttaataaaaacaaaacagatcggatacgcatgaggct

SEQ ID NO: 2802 - DNA, 146 bp, Artificial Sequence
  Bisulfite Padlock Probe
  misc_feature 92, 93, 94, 95, 96, 97: n = A,T,C or G
gactggaagagcactgttacctttacaaccgcatccttccctagttggaggctcatcgttcctattcaggcagatgttatcgaggtccgacnnnnnncaactacgacctttaataaaaacaaaacagatcggatacgcatgaggct

SEQ ID NO: 2803 - DNA, 146 bp, Artificial Sequence
  Bisulfite Padlock Probe
  misc_feature 95, 96, 97, 98, 99, 100: n = A,T,C or G
gactggaagagcactgttacctttcccaccatttttcacttcactagttggaggctcatcgttcctattcaggcagatgttatcgaggtccgacnnnnnnataatataaacgacgcccgtccaatcgatcggatacgcatgaggct

SEQ ID NO: 2804 - DNA, 146 bp, Artificial Sequence
  Bisulfite Padlock Probe
  misc_feature 95, 96, 97, 98, 99, 100: n = A,T,C or G
gactggaagagcactgttacctttcccgccatttttcacttcactagttggaggctcatcgttcctattcaggcagatgttatcgaggtccgacnnnnnnataatataaacgacgcccgtccgatcgatcggatacgcatgaggct

SEQ ID NO: 2805 - DNA, 146 bp, Artificial Sequence
  Bisulfite Padlock Probe
  misc_feature 95, 96, 97, 98, 99, 100: n = A,T,C or G
gactggaagagcactgttaccttttccaaacgcgaattccatacacgttggaggctcatcgttcctattcaggcagatgttatcgaggtccgacnnnnnncctccctccgacccttcctcaataaagatcggatacgcatgaggct

SEQ ID NO: 2806 - DNA, 146 bp, Artificial Sequence
  Bisulfite Padlock Probe
  misc_feature 95, 96, 97, 98, 99, 100: n = A,T,C or G
gactggaagagcactgttaccttttccaaacgcgaattccatacgcgttggaggctcatcgttcctattcaggcagatgttatcgaggtccgacnnnnnncctccctccgacccttcctcgataaagatcggatacgcatgaggct

SEQ ID NO: 2807 - DNA, 146 bp, Artificial Sequence
  Bisulfite Padlock Probe
  misc_feature 96, 97, 98, 99, 100, 101: n = A,T,C or G
gactggaagagcactgttacgaaaaacgaaacgaaacgaaaccgacagttggaggctcatcgttcctattcaggcagatgttatcgaggtccgacnnnnnngacgacctcgacgcgacataaaaacgatcggatacgcatgaggct

SEQ ID NO: 2808 - DNA, 146 bp, Artificial Sequence
  Bisulfite Padlock Probe
  misc_feature 96, 97, 98, 99, 100, 101: n = A,T,C or G
gactggaagagcactgttacgaaaaacgaaacgaaacgaaaccgacggttggaggctcatcgttcctattcaggcagatgttatcgaggtccgacnnnnnngacgacctcgacgcgacgtaaaaacgatcggatacgcatgaggct

SEQ ID NO: 2809 - DNA, 146 bp, Artificial Sequence
  Bisulfite Padlock Probe
  misc_feature 92, 93, 94, 95, 96, 97: n = A,T,C or G
gactggaagagcactgttacgaaaacaaaaacacaaccaactcgttggaggctcatcgttcctattcaggcagatgttatcgaggtccgacnnnnnnaaaaacctccaatacaaccaacccaaacagatcggatacgcatgaggct

SEQ ID NO: 2810 - DNA, 146 bp, Artificial Sequence
  Bisulfite Padlock Probe
  misc_feature 92, 93, 94, 95, 96, 97: n = A,T,C or G
gactggaagagcactgttacgaaaacaaaaacgcaaccaactcgttggaggctcatcgttcctattcaggcagatgttatcgaggtccgacnnnnnnaaaaacctccaatacgaccaacccaaacagatcggatacgcatgaggct

SEQ ID NO: 2811 - DNA, 146 bp, Artificial Sequence
  Bisulfite Padlock Probe
  misc_feature 93, 94, 95, 96, 97, 98: n = A,T,C or G
gactggaagagcactgttacgaaaacgaaaaccgaaacaaaaccgttggaggctcatcgttcctattcaggcagatgttatcgaggtccgacnnnnnnaaacccaaaaacgatcccaacaaacaacgatcggatacgcatgaggct

SEQ ID NO: 2812 - DNA, 146 bp, Artificial Sequence
  Bisulfite Padlock Probe
  misc_feature 93, 94, 95, 96, 97, 98: n = A,T,C or G
gactggaagagcactgttacgaaaacgaaaaccgaaacgaaaccgttggaggctcatcgttcctattcaggcagatgttatcgaggtccgacnnnnnnaaacccaaaaacgatcccaacaaacgacgatcggatacgcatgaggct

SEQ ID NO: 2813 - DNA, 146 bp, Artificial Sequence
  Bisulfite Padlock Probe
  misc_feature 93, 94, 95, 96, 97, 98: n = A,T,C or G
gactggaagagcactgttacgaaaacgaaccgcgacataaacacgttggaggctcatcgttcctattcaggcagatgttatcgaggtccgacnnnnnnaaaaatcgaaaccaactcctataaaaacgatcggatacgcatgaggct

SEQ ID NO: 2814 - DNA, 146 bp, Artificial Sequence
  Bisulfite Padlock Probe
  misc_feature 93, 94, 95, 96, 97, 98: n = A,T,C or G
gactggaagagcactgttacgaaaacgaaccgcgacgtaaacacgttggaggctcatcgttcctattcaggcagatgttatcgaggtccgacnnnnnnaaaaatcgaaaccgactcctataaaaacgatcggatacgcatgaggct

SEQ ID NO: 2815 - DNA, 146 bp, Artificial Sequence
  Bisulfite Padlock Probe
  misc_feature 92, 93, 94, 95, 96, 97: n = A,T,C or G
gactggaagagcactgttacgaaaactacgcgaacgcaaaaacgttggaggctcatcgttcctattcaggcagatgttatcgaggtccgacnnnnnncctacccaaaccaatttcaaaaccttctcgatcggatacgcatgaggct

SEQ ID NO: 2816 - DNA, 146 bp, Artificial Sequence
  Bisulfite Padlock Probe
  misc_feature 92, 93, 94, 95, 96, 97: n = A,T,C or G
gactggaagagcactgttacgaaaactacgcgaacgcgaaaacgttggaggctcatcgttcctattcaggcagatgttatcgaggtccgacnnnnnncctacccaaaccaatttcgaaaccttctcgatcggatacgcatgaggct

SEQ ID NO: 2817 - DNA, 146 bp, Artificial Sequence
  Bisulfite Padlock Probe
  misc_feature 96, 97, 98, 99, 100, 101: n = A,T,C or G
gactggaagagcactgttacgaaaatctaaacactactcccaaacccgttggaggctcatcgttcctattcaggcagatgttatcgaggtccgacnnnnnnaaaaccccgaaaaaccaaccacaccgatcggatacgcatgaggct

SEQ ID NO: 2818 - DNA, 146 bp, Artificial Sequence
  Bisulfite Padlock Probe
  misc_feature 96, 97, 98, 99, 100, 101: n = A,T,C or G
gactggaagagcactgttacgaaaatctaaacgctactcccaaacccgttggaggctcatcgttcctattcaggcagatgttatcgaggtccgacnnnnnnaaaaccccgaaaaaccaaccgcaccgatcggatacgcatgaggct

SEQ ID NO: 2819 - DNA, 146 bp, Artificial Sequence
  Bisulfite Padlock Probe
  misc_feature 93, 94, 95, 96, 97, 98: n = A,T,C or G
gactggaagagcactgttacgaaaattaactcactaacaaaaaagttggaggctcatcgttcctattcaggcagatgttatcgaggtccgacnnnnnnaaaactaaccgaaaccgaaaccaaaaccgatcggatacgcatgaggct

SEQ ID NO: 2820 - DNA, 146 bp, Artificial Sequence
  Bisulfite Padlock Probe
  misc_feature 93, 94, 95, 96, 97, 98: n = A,T,C or G
gactggaagagcactgttacgaaaattaactcactaacgaaaaagttggaggctcatcgttcctattcaggcagatgttatcgaggtccgacnnnnnnaaaactaaccgaaaccgaaaccgaaaccgatcggatacgcatgaggct

SEQ ID NO: 2821 - DNA, 146 bp, Artificial Sequence
  Bisulfite Padlock Probe
  misc_feature 92, 93, 94, 95, 96, 97: n = A,T,C or G
gactggaagagcactgttacgaaaccaaaataaaaccaaaaccgttggaggctcatcgttcctattcaggcagatgttatcgaggtccgacnnnnnnaaaataataaacacctaactttcaaatccgatcggatacgcatgaggct

SEQ ID NO: 2822 - DNA, 146 bp, Artificial Sequence
  Bisulfite Padlock Probe
  misc_feature 92, 93, 94, 95, 96, 97: n = A,T,C or G
gactggaagagcactgttacgaaaccaaaataaaaccgaaaccgttggaggctcatcgttcctattcaggcagatgttatcgaggtccgacnnnnnnaaaataataaacgcctaactttcaaatccgatcggatacgcatgaggct

SEQ ID NO: 2823 - DNA, 146 bp, Artificial Sequence
  Bisulfite Padlock Probe
  misc_feature 95, 96, 97, 98, 99, 100: n = A,T,C or G
gactggaagagcactgttacgaaaccgaaaacaaaacaacaaatacgttggaggctcatcgttcctattcaggcagatgttatcgaggtccgacnnnnnntatttcttccgtctcgaacccaaaacgatcggatacgcatgaggct

SEQ ID NO: 2824 - DNA, 146 bp, Artificial Sequence
  Bisulfite Padlock Probe
  misc_feature 95, 96, 97, 98, 99, 100: n = A,T,C or G
gactggaagagcactgttacgaaaccgaaaacgaaacaacaaatacgttggaggctcatcgttcctattcaggcagatgttatcgaggtccgacnnnnnntatttcttccgtctcgaacccgaaacgatcggatacgcatgaggct

SEQ ID NO: 2825 - DNA, 146 bp, Artificial Sequence
  Bisulfite Padlock Probe
  misc_feature 95, 96, 97, 98, 99, 100: n = A,T,C or G
gactggaagagcactgttacgaaaccgaaaacgcctaaacgtcatagttggaggctcatcgttcctattcaggcagatgttatcgaggtccgacnnnnnnaaaaatacgcgcatcaactaccccacgatcggatacgcatgaggct

SEQ ID NO: 2826 - DNA, 146 bp, Artificial Sequence
  Bisulfite Padlock Probe
  misc_feature 95, 96, 97, 98, 99, 100: n = A,T,C or G
gactggaagagcactgttacgaaaccgaaaacgcctaaacgtcgtagttggaggctcatcgttcctattcaggcagatgttatcgaggtccgacnnnnnnaaaaatacgcgcatcaactaccccgcgatcggatacgcatgaggct

SEQ ID NO: 2827 - DNA, 146 bp, Artificial Sequence
  Bisulfite Padlock Probe
  misc_feature 92, 93, 94, 95, 96, 97: n = A,T,C or G
gactggaagagcactgttacgaaaccttcccctaatccactccgttggaggctcatcgttcctattcaggcagatgttatcgaggtccgacnnnnnnaaaaaccccacccttatcctctttaaaaagatcggatacgcatgaggct

SEQ ID NO: 2828 - DNA, 146 bp, Artificial Sequence
  Bisulfite Padlock Probe
  misc_feature 92, 93, 94, 95, 96, 97: n = A,T,C or G
gactggaagagcactgttacgaaaccttcccctaatccgctccgttggaggctcatcgttcctattcaggcagatgttatcgaggtccgacnnnnnnaaaaaccccacccttatcctctttaaaaagatcggatacgcatgaggct

SEQ ID NO: 2829 - DNA, 146 bp, Artificial Sequence
  Bisulfite Padlock Probe
  misc_feature 93, 94, 95, 96, 97, 98: n = A,T,C or G
gactggaagagcactgttacgaaataaataatcccaaataaaatgttggaggctcatcgttcctattcaggcagatgttatcgaggtccgacnnnnnnaaatcgcctataactaaatcaacctaccgatcggatacgcatgaggct

SEQ ID NO: 2830 - DNA, 146 bp, Artificial Sequence
  Bisulfite Padlock Probe
  misc_feature 94, 95, 96, 97, 98, 99: n = A,T,C or G
gactggaagagcactgttacgaacaccctcatcctccaactacacgttggaggctcatcgttcctattcaggcagatgttatcgaggtccgacnnnnnnataaaactaacgctaaaaaccgccaccgatcggatacgcatgaggct

SEQ ID NO: 2831 - DNA, 146 bp, Artificial Sequence
  Bisulfite Padlock Probe
  misc_feature 93, 94, 95, 96, 97, 98: n = A,T,C or G
gactggaagagcactgttacgaacatctacaccccctacttcacgttggaggctcatcgttcctattcaggcagatgttatcgaggtccgacnnnnnnactcttcaactccatctcccttactctcgatcggatacgcatgaggct

SEQ ID NO: 2832 - DNA, 146 bp, Artificial Sequence
  Bisulfite Padlock Probe
  misc_feature 93, 94, 95, 96, 97, 98: n = A,T,C or G
gactggaagagcactgttacgaacattaaacactcgaccaaccagttggaggctcatcgttcctattcaggcagatgttatcgaggtccgacnnnnnnaatcgaaactacacataccaccattaccgatcggatacgcatgaggct

SEQ ID NO: 2833 - DNA, 146 bp, Artificial Sequence
  Bisulfite Padlock Probe
  misc_feature 93, 94, 95, 96, 97, 98: n = A,T,C or G
gactggaagagcactgttacgaacattaaacactcgaccgaccagttggaggctcatcgttcctattcaggcagatgttatcgaggtccgacnnnnnnaatcgaaactacacataccaccgttaccgatcggatacgcatgaggct

SEQ ID NO: 2834 - DNA, 146 bp, Artificial Sequence
  Bisulfite Padlock Probe
  misc_feature 92, 93, 94, 95, 96, 97: n = A,T,C or G
gactggaagagcactgttacgaaccctctcactcctatccctcgttggaggctcatcgttcctattcaggcagatgttatcgaggtccgacnnnnnnaaaaacctaacaaaacccaacaaaccctcgatcggatacgcatgaggct

SEQ ID NO: 2835 - DNA, 146 bp, Artificial Sequence
  Bisulfite Padlock Probe
  misc_feature 92, 93, 94, 95, 96, 97: n = A,T,C or G
gactggaagagcactgttacgaaccctctcgctcctatccctcgttggaggctcatcgttcctattcaggcagatgttatcgaggtccgacnnnnnnaaaaacctaacaaaacccgacaaaccctcgatcggatacgcatgaggct

SEQ ID NO: 2836 - DNA, 146 bp, Artificial Sequence
  Bisulfite Padlock Probe
  misc_feature 93, 94, 95, 96, 97, 98: n = A,T,C or G
gactggaagagcactgttacgaacgtctacaccccctacttcacgttggaggctcatcgttcctattcaggcagatgttatcgaggtccgacnnnnnnactcttcaactccgtctcccttactctcgatcggatacgcatgaggct

SEQ ID NO: 2837 - DNA, 146 bp, Artificial Sequence
  Bisulfite Padlock Probe
  misc_feature 92, 93, 94, 95, 96, 97: n = A,T,C or G
gactggaagagcactgttacgaactaaaacgacaaccaaaaaagttggaggctcatcgttcctattcaggcagatgttatcgaggtccgacnnnnnnataacaaaaacgcgaactaaaaccaaaacgatcggatacgcatgaggct

SEQ ID NO: 2838 - DNA, 146 bp, Artificial Sequence
  Bisulfite Padlock Probe
  misc_feature 92, 93, 94, 95, 96, 97: n = A,T,C or G
gactggaagagcactgttacgaactaaaacgacaaccgaaaaagttggaggctcatcgttcctattcaggcagatgttatcgaggtccgacnnnnnnataacaaaaacgcgaactaaaaccgaaacgatcggatacgcatgaggct

SEQ ID NO: 2839 - DNA, 146 bp, Artificial Sequence
  Bisulfite Padlock Probe
  misc_feature 92, 93, 94, 95, 96, 97: n = A,T,C or G
gactggaagagcactgttacgaataccaaaactaaaaatctctgttggaggctcatcgttcctattcaggcagatgttatcgaggtccgacnnnnnnactcccaaaatacaacctttctaaaaaccgatcggatacgcatgaggct

SEQ ID NO: 2840 - DNA, 146 bp, Artificial Sequence
  Bisulfite Padlock Probe
  misc_feature 92, 93, 94, 95, 96, 97: n = A,T,C or G
gactggaagagcactgttacgaataccgaaactaaaaatctctgttggaggctcatcgttcctattcaggcagatgttatcgaggtccgacnnnnnnactcccaaaatacaacctttctaaaaaccgatcggatacgcatgaggct

SEQ ID NO: 2841 - DNA, 146 bp, Artificial Sequence
  Bisulfite Padlock Probe
  misc_feature 94, 95, 96, 97, 98, 99: n = A,T,C or G
gactggaagagcactgttacgaatataaaaatcacaaactaaaaagttggaggctcatcgttcctattcaggcagatgttatcgaggtccgacnnnnnnatccatcaaacacgcaataacctaaaagatcggatacgcatgaggct

SEQ ID NO: 2842 - DNA, 146 bp, Artificial Sequence
  Bisulfite Padlock Probe
  misc_feature 94, 95, 96, 97, 98, 99: n = A,T,C or G
gactggaagagcactgttacgaatataaaaatcgcaaactaaaaagttggaggctcatcgttcctattcaggcagatgttatcgaggtccgacnnnnnnatccatcaaacacgcgataacctaaaagatcggatacgcatgaggct

SEQ ID NO: 2843 - DNA, 146 bp, Artificial Sequence
  Bisulfite Padlock Probe
  misc_feature 93, 94, 95, 96, 97, 98: n = A,T,C or G
gactggaagagcactgttacgaatcaaataaaaccaacccaaccgttggaggctcatcgttcctattcaggcagatgttatcgaggtccgacnnnnnncaatcgctaccgacccaaataaccaaacgatcggatacgcatgaggct

SEQ ID NO: 2844 - DNA, 146 bp, Artificial Sequence
  Bisulfite Padlock Probe
  misc_feature 93, 94, 95, 96, 97, 98: n = A,T,C or G
gactggaagagcactgttacgaatcaaataaaaccgacccaaccgttggaggctcatcgttcctattcaggcagatgttatcgaggtccgacnnnnnncaatcgctaccgacccaaataaccgaacgatcggatacgcatgaggct

SEQ ID NO: 2845 - DNA, 146 bp, Artificial Sequence
  Bisulfite Padlock Probe
  misc_feature 92, 93, 94, 95, 96, 97: n = A,T,C or G
gactggaagagcactgttacgaatcacaccctccacctctaaagttggaggctcatcgttcctattcaggcagatgttatcgaggtccgacnnnnnnaacttcacaccaaacaaaaccaaccacaagatcggatacgcatgaggct

SEQ ID NO: 2846 - DNA, 146 bp, Artificial Sequence
  Bisulfite Padlock Probe
  misc_feature 92, 93, 94, 95, 96, 97: n = A,T,C or G
gactggaagagcactgttacgacaaaacgcaacaaactaaaaagttggaggctcatcgttcctattcaggcagatgttatcgaggtccgacnnnnnnaaaaacctaaaactacgaacgcgcaaaaagatcggatacgcatgaggct

SEQ ID NO: 2847 - DNA, 146 bp, Artificial Sequence
  Bisulfite Padlock Probe
  misc_feature 92, 93, 94, 95, 96, 97: n = A,T,C or G
gactggaagagcactgttacgacaaaacgcaacgaactaaaaagttggaggctcatcgttcctattcaggcagatgttatcgaggtccgacnnnnnnaaaaacctaaaactacgaacgcgcgaaaagatcggatacgcatgaggct

SEQ ID NO: 2848 - DNA, 146 bp, Artificial Sequence
  Bisulfite Padlock Probe
  misc_feature 92, 93, 94, 95, 96, 97: n = A,T,C or G
gactggaagagcactgttacgacactacaaaacgaatacaaacgttggaggctcatcgttcctattcaggcagatgttatcgaggtccgacnnnnnnacccataaacaccttcataatttaaaccagatcggatacgcatgaggct

SEQ ID NO: 2849 - DNA, 146 bp, Artificial Sequence
  Bisulfite Padlock Probe
  misc_feature 92, 93, 94, 95, 96, 97: n = A,T,C or G
gactggaagagcactgttacgacactacaaaacgaatacgaacgttggaggctcatcgttcctattcaggcagatgttatcgaggtccgacnnnnnnacccataaacgccttcataatttaaaccagatcggatacgcatgaggct

SEQ ID NO: 2850 - DNA, 146 bp, Artificial Sequence
  Bisulfite Padlock Probe
  misc_feature 92, 93, 94, 95, 96, 97: n = A,T,C or G
gactggaagagcactgttacgaccacacccacccaaaaatctcgttggaggctcatcgttcctattcaggcagatgttatcgaggtccgacnnnnnntcttcaccccgaaacaacgtaaaaacctcgatcggatacgcatgaggct

SEQ ID NO: 2851 - DNA, 146 bp, Artificial Sequence
  Bisulfite Padlock Probe
  misc_feature 92, 93, 94, 95, 96, 97: n = A,T,C or G
gactggaagagcactgttacgacctaacccctcatcctaactcgttggaggctcatcgttcctattcaggcagatgttatcgaggtccgacnnnnnnacgtccaaaaacaacgcgaaacgttaaccgatcggatacgcatgaggct

SEQ ID NO: 2852 - DNA, 146 bp, Artificial Sequence
  Bisulfite Padlock Probe
  misc_feature 92, 93, 94, 95, 96, 97: n = A,T,C or G
gactggaagagcactgttacgacgacgaaatctaacacaaaaagttggaggctcatcgttcctattcaggcagatgttatcgaggtccgacnnnnnnaaacacgactaccgaactccatcctaaaagatcggatacgcatgaggct

SEQ ID NO: 2853 - DNA, 146 bp, Artificial Sequence
  Bisulfite Padlock Probe
  misc_feature 92, 93, 94, 95, 96, 97: n = A,T,C or G
gactggaagagcactgttacgacgacgaaatctaacgcaaaaagttggaggctcatcgttcctattcaggcagatgttatcgaggtccgacnnnnnnaaacacgactaccgaactccgtcctaaaagatcggatacgcatgaggct

SEQ ID NO: 2854 - DNA, 146 bp, Artificial Sequence
  Bisulfite Padlock Probe
  misc_feature 92, 93, 94, 95, 96, 97: n = A,T,C or G
gactggaagagcactgttacgacgacgacgtaacaaaactaccgttggaggctcatcgttcctattcaggcagatgttatcgaggtccgacnnnnnnaacaaactacccacacccaaataaacacagatcggatacgcatgaggct

SEQ ID NO: 2855 - DNA, 146 bp, Artificial Sequence
  Bisulfite Padlock Probe
  misc_feature 92, 93, 94, 95, 96, 97: n = A,T,C or G
gactggaagagcactgttacgacgacgacgtaacgaaactaccgttggaggctcatcgttcctattcaggcagatgttatcgaggtccgacnnnnnnaacgaactacccacacccaaataaacacagatcggatacgcatgaggct

SEQ ID NO: 2856 - DNA, 146 bp, Artificial Sequence
  Bisulfite Padlock Probe
  misc_feature 92, 93, 94, 95, 96, 97: n = A,T,C or G
gactggaagagcactgttacgacgacgataatacaacaaccccgttggaggctcatcgttcctattcaggcagatgttatcgaggtccgacnnnnnncccaacgtaaacaacccaaaaacgcaatagatcggatacgcatgaggct

SEQ ID NO: 2857 - DNA, 146 bp, Artificial Sequence
  Bisulfite Padlock Probe
  misc_feature 92, 93, 94, 95, 96, 97: n = A,T,C or G
gactggaagagcactgttacgacgacgataatacgacaaccccgttggaggctcatcgttcctattcaggcagatgttatcgaggtccgacnnnnnncccaacgtaaacaacccaaaaacgcgatagatcggatacgcatgaggct

SEQ ID NO: 2858 - DNA, 146 bp, Artificial Sequence
  Bisulfite Padlock Probe
  misc_feature 95, 96, 97, 98, 99, 100: n = A,T,C or G
gactggaagagcactgttacgacgccaacaacgaaaactacaaaacgttggaggctcatcgttcctattcaggcagatgttatcgaggtccgacnnnnnnctcgccgaacccaaactacctaaaccgatcggatacgcatgaggct

SEQ ID NO: 2859 - DNA, 146 bp, Artificial Sequence
  Bisulfite Padlock Probe
  misc_feature 95, 96, 97, 98, 99, 100: n = A,T,C or G
gactggaagagcactgttacgacgccaacaacgaaaactacgaaacgttggaggctcatcgttcctattcaggcagatgttatcgaggtccgacnnnnnnctcgccgaacccgaactacctaaaccgatcggatacgcatgaggct

SEQ ID NO: 2860 - DNA, 146 bp, Artificial Sequence
  Bisulfite Padlock Probe
  misc_feature 94, 95, 96, 97, 98, 99: n = A,T,C or G
gactggaagagcactgttacgactctcgactccgaaaaacaaatcgttggaggctcatcgttcctattcaggcagatgttatcgaggtccgacnnnnnnacgaaaaacgaaaataaacaccaaaacgatcggatacgcatgaggct

SEQ ID NO: 2861 - DNA, 146 bp, Artificial Sequence
  Bisulfite Padlock Probe
  misc_feature 94, 95, 96, 97, 98, 99: n = A,T,C or G
gactggaagagcactgttacgactctcgactccgaaaaacgaatcgttggaggctcatcgttcctattcaggcagatgttatcgaggtccgacnnnnnnacgaaaaacgaaaataaacgccaaaacgatcggatacgcatgaggct

SEQ ID NO: 2862 - DNA, 146 bp, Artificial Sequence
  Bisulfite Padlock Probe
  misc_feature 93, 94, 95, 96, 97, 98: n = A,T,C or G
gactggaagagcactgttacgacttttctttcgaaaaacaaccagttggaggctcatcgttcctattcaggcagatgttatcgaggtccgacnnnnnnaaaaaccgaaacgccaacactaaaacccgatcggatacgcatgaggct

SEQ ID NO: 2863 - DNA, 146 bp, Artificial Sequence
  Bisulfite Padlock Probe
  misc_feature 93, 94, 95, 96, 97, 98: n = A,T,C or G
gactggaagagcactgttacgacttttctttcgaaaaacgaccagttggaggctcatcgttcctattcaggcagatgttatcgaggtccgacnnnnnnaaaaaccgaaacgccaacgctaaaacccgatcggatacgcatgaggct

SEQ ID NO: 2864 - DNA, 146 bp, Artificial Sequence
  Bisulfite Padlock Probe
  misc_feature 92, 93, 94, 95, 96, 97: n = A,T,C or G
gactggaagagcactgttacgatacgaaaacccatacaaaaccgttggaggctcatcgttcctattcaggcagatgttatcgaggtccgacnnnnnnataatcttaaccttaccaatcttacaactgatcggatacgcatgaggct

SEQ ID NO: 2865 - DNA, 146 bp, Artificial Sequence
  Bisulfite Padlock Probe
  misc_feature 92, 93, 94, 95, 96, 97: n = A,T,C or G
gactggaagagcactgttacgatacgaaaacccatacgaaaccgttggaggctcatcgttcctattcaggcagatgttatcgaggtccgacnnnnnnataatcttaaccttaccaatcttacaactgatcggatacgcatgaggct

SEQ ID NO: 2866 - DNA, 146 bp, Artificial Sequence
  Bisulfite Padlock Probe
  misc_feature 92, 93, 94, 95, 96, 97: n = A,T,C or G
gactggaagagcactgttacgatcaaactcgcgcataaactttgttggaggctcatcgttcctattcaggcagatgttatcgaggtccgacnnnnnnaaaaacgaccgccctttaaaaacccaacagatcggatacgcatgaggct

SEQ ID NO: 2867 - DNA, 146 bp, Artificial Sequence
  Bisulfite Padlock Probe
  misc_feature 92, 93, 94, 95, 96, 97: n = A,T,C or G
gactggaagagcactgttacgatcaaactcgcgcgtaaactttgttggaggctcatcgttcctattcaggcagatgttatcgaggtccgacnnnnnnaaaaacgaccgccctttaaaaacccaacggatcggatacgcatgaggct

SEQ ID NO: 2868 - DNA, 146 bp, Artificial Sequence
  Bisulfite Padlock Probe
  misc_feature 96, 97, 98, 99, 100, 101: n = A,T,C or G
gactggaagagcactgttacgcaaaacgacccctcaaaaatcaaaaagttggaggctcatcgttcctattcaggcagatgttatcgaggtccgacnnnnnnactacgacgccgcaaactaaaaaccgatcggatacgcatgaggct

SEQ ID NO: 2869 - DNA, 146 bp, Artificial Sequence
  Bisulfite Padlock Probe
  misc_feature 96, 97, 98, 99, 100, 101: n = A,T,C or G
gactggaagagcactgttacgcaaaacgacccctcaaaaatcgaaaagttggaggctcatcgttcctattcaggcagatgttatcgaggtccgacnnnnnnactacgacgccgcgaactaaaaaccgatcggatacgcatgaggct

SEQ ID NO: 2870 - DNA, 146 bp, Artificial Sequence
  Bisulfite Padlock Probe
  misc_feature 93, 94, 95, 96, 97, 98: n = A,T,C or G
gactggaagagcactgttacgcaaaactctcaaactataatcctgttggaggctcatcgttcctattcaggcagatgttatcgaggtccgacnnnnnncctctacctccaactatttaaatctttcgatcggatacgcatgaggct

SEQ ID NO: 2871 - DNA, 146 bp, Artificial Sequence
  Bisulfite Padlock Probe
  misc_feature 95, 96, 97, 98, 99, 100: n = A,T,C or G
gactggaagagcactgttacgcaacatcctcttcctcctaactaccgttggaggctcatcgttcctattcaggcagatgttatcgaggtccgacnnnnnnaaaacgcgcgaacaaaacgaaaaaccgatcggatacgcatgaggct

SEQ ID NO: 2872 - DNA, 146 bp, Artificial Sequence
  Bisulfite Padlock Probe
  misc_feature 96, 97, 98, 99, 100, 101: n = A,T,C or G
gactggaagagcactgttacgcaacgaacgaaacaaaacctcaaaaagttggaggctcatcgttcctattcaggcagatgttatcgaggtccgacnnnnnncaaatccccgacaacgaccaaacaagatcggatacgcatgaggct

SEQ ID NO: 2873 - DNA, 146 bp, Artificial Sequence
  Bisulfite Padlock Probe
  misc_feature 96, 97, 98, 99, 100, 101: n = A,T,C or G
gactggaagagcactgttacgcaacgaacgaaacgaaacctcaaaaagttggaggctcatcgttcctattcaggcagatgttatcgaggtccgacnnnnnncaaatccccgacaacgaccgaacaagatcggatacgcatgaggct

SEQ ID NO: 2874 - DNA, 146 bp, Artificial Sequence
  Bisulfite Padlock Probe
  misc_feature 96, 97, 98, 99, 100, 101: n = A,T,C or G
gactggaagagcactgttacgcaacttaaataaaattaaaatcctaagttggaggctcatcgttcctattcaggcagatgttatcgaggtccgacnnnnnngaaatcccgacaacgcctaccctccgatcggatacgcatgaggct

SEQ ID NO: 2875 - DNA, 146 bp, Artificial Sequence
  Bisulfite Padlock Probe
  misc_feature 95, 96, 97, 98, 99, 100: n = A,T,C or G
gactggaagagcactgttacgcaccaactaacaataacccaacaacgttggaggctcatcgttcctattcaggcagatgttatcgaggtccgacnnnnnnaaattaaaaacctaactaaaactatagatcggatacgcatgaggct

SEQ ID NO: 2876 - DNA, 146 bp, Artificial Sequence
  Bisulfite Padlock Probe
  misc_feature 95, 96, 97, 98, 99, 100: n = A,T,C or G
gactggaagagcactgttacgcaccaactaacgataacccaacaacgttggaggctcatcgttcctattcaggcagatgttatcgaggtccgacnnnnnnaaattaaaaacctaactaaaactatagatcggatacgcatgaggct

SEQ ID NO: 2877 - DNA, 146 bp, Artificial Sequence
  Bisulfite Padlock Probe
  misc_feature 92, 93, 94, 95, 96, 97: n = A,T,C or G
gactggaagagcactgttacgcacgcactcctaactacactaagttggaggctcatcgttcctattcaggcagatgttatcgaggtccgacnnnnnnctatacacaacgtaaccctaaacaaaaaagatcggatacgcatgaggct

SEQ ID NO: 2878 - DNA, 146 bp, Artificial Sequence
  Bisulfite Padlock Probe
  misc_feature 92, 93, 94, 95, 96, 97: n = A,T,C or G
gactggaagagcactgttacgcacgcgctcctaactacactaagttggaggctcatcgttcctattcaggcagatgttatcgaggtccgacnnnnnnctatacacaacgtaaccctaaacgaaaaagatcggatacgcatgaggct

SEQ ID NO: 2879 - DNA, 146 bp, Artificial Sequence
  Bisulfite Padlock Probe
  misc_feature 92, 93, 94, 95, 96, 97: n = A,T,C or G
gactggaagagcactgttacgccaaaacaaataataaaactccgttggaggctcatcgttcctattcaggcagatgttatcgaggtccgacnnnnnncaatctctctccgctcccaaccaaataacgatcggatacgcatgaggct

SEQ ID NO: 2880 - DNA, 146 bp, Artificial Sequence
  Bisulfite Padlock Probe
  misc_feature 92, 93, 94, 95, 96, 97: n = A,T,C or G
gactggaagagcactgttacgccaaaacgaataataaaactccgttggaggctcatcgttcctattcaggcagatgttatcgaggtccgacnnnnnncaatctctctccgctcccaaccgaataacgatcggatacgcatgaggct

SEQ ID NO: 2881 - DNA, 146 bp, Artificial Sequence
  Bisulfite Padlock Probe
  misc_feature 92, 93, 94, 95, 96, 97: n = A,T,C or G
gactggaagagcactgttacgccacaatacccaacacaaaaacgttggaggctcatcgttcctattcaggcagatgttatcgaggtccgacnnnnnntccacttctaaaaaccacctacccaaatcgatcggatacgcatgaggct

SEQ ID NO: 2882 - DNA, 146 bp, Artificial Sequence
  Bisulfite Padlock Probe
  misc_feature 92, 93, 94, 95, 96, 97: n = A,T,C or G
gactggaagagcactgttacgccacaatacccgacacaaaaacgttggaggctcatcgttcctattcaggcagatgttatcgaggtccgacnnnnnntccacttctaaaaaccacctacccaaatcgatcggatacgcatgaggct

SEQ ID NO: 2883 - DNA, 146 bp, Artificial Sequence
  Bisulfite Padlock Probe
  misc_feature 92, 93, 94, 95, 96, 97: n = A,T,C or G
gactggaagagcactgttacgccacctaaaaactccctcaaaagttggaggctcatcgttcctattcaggcagatgttatcgaggtccgacnnnnnnaacaactacaaaatccaaaaacacaaaaagatcggatacgcatgaggct

SEQ ID NO: 2884 - DNA, 146 bp, Artificial Sequence
  Bisulfite Padlock Probe
  misc_feature 92, 93, 94, 95, 96, 97: n = A,T,C or G
gactggaagagcactgttacgccacctaaaaactccctcgaaagttggaggctcatcgttcctattcaggcagatgttatcgaggtccgacnnnnnnaacaactacgaaatccaaaaacacaaaaagatcggatacgcatgaggct

SEQ ID NO: 2885 - DNA, 146 bp, Artificial Sequence
  Bisulfite Padlock Probe
  misc_feature 92, 93, 94, 95, 96, 97: n = A,T,C or G
gactggaagagcactgttacgcccgcaaacataaacaccaaacgttggaggctcatcgttcctattcaggcagatgttatcgaggtccgacnnnnnnccgcgccgaaactaaaaacaaaaacctacgatcggatacgcatgaggct

SEQ ID NO: 2886 - DNA, 146 bp, Artificial Sequence
  Bisulfite Padlock Probe
  misc_feature 92, 93, 94, 95, 96, 97: n = A,T,C or G
gactggaagagcactgttacgcccgcgaacataaacaccaaacgttggaggctcatcgttcctattcaggcagatgttatcgaggtccgacnnnnnnccgcgccgaaactaaaaacgaaaacctacgatcggatacgcatgaggct

SEQ ID NO: 2887 - DNA, 146 bp, Artificial Sequence
  Bisulfite Padlock Probe
  misc_feature 92, 93, 94, 95, 96, 97: n = A,T,C or G
gactggaagagcactgttacgccgattttcccaaaccatacttgttggaggctcatcgttcctattcaggcagatgttatcgaggtccgacnnnnnnaaattaaatttcgaaactcacccaaaatagatcggatacgcatgaggct

SEQ ID NO: 2888 - DNA, 146 bp, Artificial Sequence
  Bisulfite Padlock Probe
  misc_feature 92, 93, 94, 95, 96, 97: n = A,T,C or G
gactggaagagcactgttacgccgattttcccaaaccgtacttgttggaggctcatcgttcctattcaggcagatgttatcgaggtccgacnnnnnnaaattaaatttcgaaactcgcccaaaatagatcggatacgcatgaggct

SEQ ID NO: 2889 - DNA, 146 bp, Artificial Sequence
  Bisulfite Padlock Probe
  misc_feature 92, 93, 94, 95, 96, 97: n = A,T,C or G
gactggaagagcactgttacgcctataacctcccttcccctccgttggaggctcatcgttcctattcaggcagatgttatcgaggtccgacnnnnnnataaataaaacgtcaactcccctataatcgatcggatacgcatgaggct

SEQ ID NO: 2890 - DNA, 146 bp, Artificial Sequence
  Bisulfite Padlock Probe
  misc_feature 92, 93, 94, 95, 96, 97: n = A,T,C or G
gactggaagagcactgttacgcctcttcctacaactcaaaaccgttggaggctcatcgttcctattcaggcagatgttatcgaggtccgacnnnnnntacttaaccttctactactactaaacaatgatcggatacgcatgaggct

SEQ ID NO: 2891 - DNA, 146 bp, Artificial Sequence
  Bisulfite Padlock Probe
  misc_feature 92, 93, 94, 95, 96, 97: n = A,T,C or G
gactggaagagcactgttacgcctcttcctacgactcaaaaccgttggaggctcatcgttcctattcaggcagatgttatcgaggtccgacnnnnnntacttaaccttctactactactaaacaatgatcggatacgcatgaggct

SEQ ID NO: 2892 - DNA, 146 bp, Artificial Sequence
  Bisulfite Padlock Probe
  misc_feature 93, 94, 95, 96, 97, 98: n = A,T,C or G
gactggaagagcactgttacgcgaaactctcaaactataatcctgttggaggctcatcgttcctattcaggcagatgttatcgaggtccgacnnnnnncctctacctccgactatttaaatctttcgatcggatacgcatgaggct

SEQ ID NO: 2893 - DNA, 146 bp, Artificial Sequence
  Bisulfite Padlock Probe
  misc_feature 92, 93, 94, 95, 96, 97: n = A,T,C or G
gactggaagagcactgttacgcgaaatcccaatttctttaaaagttggaggctcatcgttcctattcaggcagatgttatcgaggtccgacnnnnnnaaacaataaaaccaatactacaaacaaccgatcggatacgcatgaggct

SEQ ID NO: 2894 - DNA, 146 bp, Artificial Sequence
  Bisulfite Padlock Probe
  misc_feature 92, 93, 94, 95, 96, 97: n = A,T,C or G
gactggaagagcactgttacgcgaaatcccgatttctttaaaagttggaggctcatcgttcctattcaggcagatgttatcgaggtccgacnnnnnnaaacaataaaaccaatactacaaacaaccgatcggatacgcatgaggct

SEQ ID NO: 2895 - DNA, 146 bp, Artificial Sequence
  Bisulfite Padlock Probe
  misc_feature 94, 95, 96, 97, 98, 99: n = A,T,C or G
gactggaagagcactgttacgcgatcccgcaaaacaaaaaacatcgttggaggctcatcgttcctattcaggcagatgttatcgaggtccgacnnnnnnctaaaacccccgcgatcgtacaacaaagatcggatacgcatgaggct

SEQ ID NO: 2896 - DNA, 146 bp, Artificial Sequence
  Bisulfite Padlock Probe
  misc_feature 94, 95, 96, 97, 98, 99: n = A,T,C or G
gactggaagagcactgttacgcgatcccgcaaaacgaaaaacatcgttggaggctcatcgttcctattcaggcagatgttatcgaggtccgacnnnnnnctaaaacccccgcgatcgtacaacgaagatcggatacgcatgaggct

SEQ ID NO: 2897 - DNA, 146 bp, Artificial Sequence
  Bisulfite Padlock Probe
  misc_feature 94, 95, 96, 97, 98, 99: n = A,T,C or G
gactggaagagcactgttacgcgatctccctactaatcaaactccgttggaggctcatcgttcctattcaggcagatgttatcgaggtccgacnnnnnnaaacaaaataacttaaatttacacctcgatcggatacgcatgaggct

SEQ ID NO: 2898 - DNA, 146 bp, Artificial Sequence
  Bisulfite Padlock Probe
  misc_feature 94, 95, 96, 97, 98, 99: n = A,T,C or G
gactggaagagcactgttacgcgatctccctactaatcgaactccgttggaggctcatcgttcctattcaggcagatgttatcgaggtccgacnnnnnnaaacgaaataacttaaatttacacctcgatcggatacgcatgaggct

SEQ ID NO: 2899 - DNA, 146 bp, Artificial Sequence
  Bisulfite Padlock Probe
  misc_feature 92, 93, 94, 95, 96, 97: n = A,T,C or G
gactggaagagcactgttacgcgtaaaacgataaaaccaaaacgttggaggctcatcgttcctattcaggcagatgttatcgaggtccgacnnnnnntactactataacacctccatcacatactcgatcggatacgcatgaggct

SEQ ID NO: 2900 - DNA, 146 bp, Artificial Sequence
  Bisulfite Padlock Probe
  misc_feature 92, 93, 94, 95, 96, 97: n = A,T,C or G
gactggaagagcactgttacgcgtaaaacgataaaaccgaaacgttggaggctcatcgttcctattcaggcagatgttatcgaggtccgacnnnnnntactactataacacctccatcacatactcgatcggatacgcatgaggct

SEQ ID NO: 2901 - DNA, 146 bp, Artificial Sequence
  Bisulfite Padlock Probe
  misc_feature 92, 93, 94, 95, 96, 97: n = A,T,C or G
gactggaagagcactgttacgcgtaaacaatacacaacttctagttggaggctcatcgttcctattcaggcagatgttatcgaggtccgacnnnnnnaaaccctaaaaaccgaacaaaaccaacccgatcggatacgcatgaggct

SEQ ID NO: 2902 - DNA, 146 bp, Artificial Sequence
  Bisulfite Padlock Probe
  misc_feature 92, 93, 94, 95, 96, 97: n = A,T,C or G
gactggaagagcactgttacgcgtaaacaatacgcaacttctagttggaggctcatcgttcctattcaggcagatgttatcgaggtccgacnnnnnnaaaccctaaaaaccgaacgaaaccaacccgatcggatacgcatgaggct

SEQ ID NO: 2903 - DNA, 146 bp, Artificial Sequence
  Bisulfite Padlock Probe
  misc_feature 93, 94, 95, 96, 97, 98: n = A,T,C or G
gactggaagagcactgttacgcgtctctaacaacaatccaaaaagttggaggctcatcgttcctattcaggcagatgttatcgaggtccgacnnnnnnaaaattctacctccaacacccaaacaacgatcggatacgcatgaggct

SEQ ID NO: 2904 - DNA, 146 bp, Artificial Sequence
  Bisulfite Padlock Probe
  misc_feature 93, 94, 95, 96, 97, 98: n = A,T,C or G
gactggaagagcactgttacgcgtctctaacaacgatccaaaaagttggaggctcatcgttcctattcaggcagatgttatcgaggtccgacnnnnnnaaaattctacctccaacacccaaacgacgatcggatacgcatgaggct

SEQ ID NO: 2905 - DNA, 146 bp, Artificial Sequence
  Bisulfite Padlock Probe
  misc_feature 92, 93, 94, 95, 96, 97: n = A,T,C or G
gactggaagagcactgttacgctcaaaataaccttaataaaaagttggaggctcatcgttcctattcaggcagatgttatcgaggtccgacnnnnnnaaaataaaccccgaaccaatactaaacacgatcggatacgcatgaggct

SEQ ID NO: 2906 - DNA, 146 bp, Artificial Sequence
  Bisulfite Padlock Probe
  misc_feature 96, 97, 98, 99, 100, 101: n = A,T,C or G
gactggaagagcactgttacgctcaaatactacaaataacccaactagttggaggctcatcgttcctattcaggcagatgttatcgaggtccgacnnnnnnaaaaacgctataattaaacgcacccgatcggatacgcatgaggct

SEQ ID NO: 2907 - DNA, 146 bp, Artificial Sequence
  Bisulfite Padlock Probe
  misc_feature 96, 97, 98, 99, 100, 101: n = A,T,C or G
gactggaagagcactgttacgctcaaatactacgaataacccaactagttggaggctcatcgttcctattcaggcagatgttatcgaggtccgacnnnnnnaaaaacgctataattaaacgcgcccgatcggatacgcatgaggct

SEQ ID NO: 2908 - DNA, 146 bp, Artificial Sequence
  Bisulfite Padlock Probe
  misc_feature 92, 93, 94, 95, 96, 97: n = A,T,C or G
gactggaagagcactgttacgtaaacccaaaaccaaactccaagttggaggctcatcgttcctattcaggcagatgttatcgaggtccgacnnnnnntaaacccttcacccacatactttccctacgatcggatacgcatgaggct

SEQ ID NO: 2909 - DNA, 146 bp, Artificial Sequence
  Bisulfite Padlock Probe
  misc_feature 92, 93, 94, 95, 96, 97: n = A,T,C or G
gactggaagagcactgttacgtaaacccaaaaccgaactccaagttggaggctcatcgttcctattcaggcagatgttatcgaggtccgacnnnnnntaaacccttcacccacgtactttccctacgatcggatacgcatgaggct

SEQ ID NO: 2910 - DNA, 146 bp, Artificial Sequence
  Bisulfite Padlock Probe
  misc_feature 92, 93, 94, 95, 96, 97: n = A,T,C or G
gactggaagagcactgttacgtaataacccataaaaccctaccgttggaggctcatcgttcctattcaggcagatgttatcgaggtccgacnnnnnnaccaccatcacgtacctaataacgaacttgatcggatacgcatgaggct

SEQ ID NO: 2911 - DNA, 146 bp, Artificial Sequence
  Bisulfite Padlock Probe
  misc_feature 94, 95, 96, 97, 98, 99: n = A,T,C or G
gactggaagagcactgttacgtacaaaacctactctttaattaaagttggaggctcatcgttcctattcaggcagatgttatcgaggtccgacnnnnnnacaacgatacaaacgaaaccaaaccccgatcggatacgcatgaggct

SEQ ID NO: 2912 - DNA, 146 bp, Artificial Sequence
  Bisulfite Padlock Probe
  misc_feature 93, 94, 95, 96, 97, 98: n = A,T,C or G
gactggaagagcactgttacgtatccccattaaaactcctaaacgttggaggctcatcgttcctattcaggcagatgttatcgaggtccgacnnnnnnctacgtaaaaccaatcgctatccaaaccgatcggatacgcatgaggct

SEQ ID NO: 2913 - DNA, 146 bp, Artificial Sequence
  Bisulfite Padlock Probe
  misc_feature 94, 95, 96, 97, 98, 99: n = A,T,C or G
gactggaagagcactgttacgtatttccgaaacgttcattacaacgttggaggctcatcgttcctattcaggcagatgttatcgaggtccgacnnnnnnaactttattcgaaaacccgcaacccctgatcggatacgcatgaggct

SEQ ID NO: 2914 - DNA, 146 bp, Artificial Sequence
  Bisulfite Padlock Probe
  misc_feature 94, 95, 96, 97, 98, 99: n = A,T,C or G
gactggaagagcactgttacgtatttccgaaacgttcgttacaacgttggaggctcatcgttcctattcaggcagatgttatcgaggtccgacnnnnnnaactttattcgaaaacccgcgacccctgatcggatacgcatgaggct

SEQ ID NO: 2915 - DNA, 146 bp, Artificial Sequence
  Bisulfite Padlock Probe
  misc_feature 93, 94, 95, 96, 97, 98: n = A,T,C or G
gactggaagagcactgttacgtcgaaaacgacgaaccaatctccgttggaggctcatcgttcctattcaggcagatgttatcgaggtccgacnnnnnnccaaaatataattatcccacaacaaaaagatcggatacgcatgaggct

SEQ ID NO: 2916 - DNA, 146 bp, Artificial Sequence
  Bisulfite Padlock Probe
  misc_feature 93, 94, 95, 96, 97, 98: n = A,T,C or G
gactggaagagcactgttacgtcgaaaacgacgaaccgatctccgttggaggctcatcgttcctattcaggcagatgttatcgaggtccgacnnnnnnccaaaatataattatcccgcaacaaaaagatcggatacgcatgaggct

SEQ ID NO: 2917 - DNA, 146 bp, Artificial Sequence
  Bisulfite Padlock Probe
  misc_feature 93, 94, 95, 96, 97, 98: n = A,T,C or G
gactggaagagcactgttacgtcgcgaacaaaactataaaaactgttggaggctcatcgttcctattcaggcagatgttatcgaggtccgacnnnnnnaccaaaattaaaaaccccgacaccgacagatcggatacgcatgaggct

SEQ ID NO: 2918 - DNA, 146 bp, Artificial Sequence
  Bisulfite Padlock Probe
  misc_feature 93, 94, 95, 96, 97, 98: n = A,T,C or G
gactggaagagcactgttacgtcgcgaacgaaactataaaaactgttggaggctcatcgttcctattcaggcagatgttatcgaggtccgacnnnnnnaccaaaattaaaaaccccgacaccgacggatcggatacgcatgaggct

SEQ ID NO: 2919 - DNA, 146 bp, Artificial Sequence
  Bisulfite Padlock Probe
  misc_feature 94, 95, 96, 97, 98, 99: n = A,T,C or G
gactggaagagcactgttacgtctacttcttcaaaaatttctccagttggaggctcatcgttcctattcaggcagatgttatcgaggtccgacnnnnnnctccaaccccgactcgacgaaaaactcgatcggatacgcatgaggct

SEQ ID NO: 2920 - DNA, 146 bp, Artificial Sequence
  Bisulfite Padlock Probe
  misc_feature 92, 93, 94, 95, 96, 97: n = A,T,C or G
gactggaagagcactgttacgtctcttcctcactacaacctacgttggaggctcatcgttcctattcaggcagatgttatcgaggtccgacnnnnnnaaaaacacaccaaaaatacctacccttccgatcggatacgcatgaggct

SEQ ID NO: 2921 - DNA, 146 bp, Artificial Sequence
  Bisulfite Padlock Probe
  misc_feature 96, 97, 98, 99, 100, 101: n = A,T,C or G
gactggaagagcactgttacgttcaatcctctaaataaaatatactcgttggaggctcatcgttcctattcaggcagatgttatcgaggtccgacnnnnnnaaacacatactacccccacccctacgatcggatacgcatgaggct

SEQ ID NO: 2922 - DNA, 146 bp, Artificial Sequence
  Bisulfite Padlock Probe
  misc_feature 95, 96, 97, 98, 99, 100: n = A,T,C or G
gactggaagagcactgttacgttcctaaaacatttcttccaaaactgttggaggctcatcgttcctattcaggcagatgttatcgaggtccgacnnnnnnttacccaaaccaattccccgcaacgagatcggatacgcatgaggct

SEQ ID NO: 2923 - DNA, 146 bp, Artificial Sequence
  Bisulfite Padlock Probe
  misc_feature 96, 97, 98, 99, 100, 101: n = A,T,C or G
gactggaagagcactgttacgttcgatcctctaaataaaatatactcgttggaggctcatcgttcctattcaggcagatgttatcgaggtccgacnnnnnnaaacacatactacccccgcccctacgatcggatacgcatgaggct

SEQ ID NO: 2924 - DNA, 146 bp, Artificial Sequence
  Bisulfite Padlock Probe
  misc_feature 96, 97, 98, 99, 100, 101: n = A,T,C or G
gactggaagagcactgttactaaaaacccgaaaacaatcgacccaacgttggaggctcatcgttcctattcaggcagatgttatcgaggtccgacnnnnnncgtacgcaaacaacgacgcaaactcgatcggatacgcatgaggct

SEQ ID NO: 2925 - DNA, 146 bp, Artificial Sequence
  Bisulfite Padlock Probe
  misc_feature 96, 97, 98, 99, 100, 101: n = A,T,C or G
gactggaagagcactgttactaaaaacccgaaaacaatcgacccgacgttggaggctcatcgttcctattcaggcagatgttatcgaggtccgacnnnnnncgtacgcaaacaacgacgcgaactcgatcggatacgcatgaggct

SEQ ID NO: 2926 - DNA, 146 bp, Artificial Sequence
  Bisulfite Padlock Probe
  misc_feature 93, 94, 95, 96, 97, 98: n = A,T,C or G
gactggaagagcactgttactaaaaaccctacgcgccaaaataagttggaggctcatcgttcctattcaggcagatgttatcgaggtccgacnnnnnnaacgactacgataataataacacaaaaagatcggatacgcatgaggct

SEQ ID NO: 2927 - DNA, 146 bp, Artificial Sequence
  Bisulfite Padlock Probe
  misc_feature 93, 94, 95, 96, 97, 98: n = A,T,C or G
gactggaagagcactgttactaaaaaccctacgcgccgaaataagttggaggctcatcgttcctattcaggcagatgttatcgaggtccgacnnnnnnaacgactacgataataataacgcaaaaagatcggatacgcatgaggct

SEQ ID NO: 2928 - DNA, 146 bp, Artificial Sequence
  Bisulfite Padlock Probe
  misc_feature 96, 97, 98, 99, 100, 101: n = A,T,C or G
gactggaagagcactgttactaaaaacgaacgacacttcctacaaccgttggaggctcatcgttcctattcaggcagatgttatcgaggtccgacnnnnnnaaccaaaccaaaacaataaacaaaagatcggatacgcatgaggct

SEQ ID NO: 2929 - DNA, 146 bp, Artificial Sequence
  Bisulfite Padlock Probe
  misc_feature 96, 97, 98, 99, 100, 101: n = A,T,C or G
gactggaagagcactgttactaaaaacgaacgacgcttcctacaaccgttggaggctcatcgttcctattcaggcagatgttatcgaggtccgacnnnnnnaaccgaaccaaaacaataaacaaaagatcggatacgcatgaggct

SEQ ID NO: 2930 - DNA, 146 bp, Artificial Sequence
  Bisulfite Padlock Probe
  misc_feature 95, 96, 97, 98, 99, 100: n = A,T,C or G
gactggaagagcactgttactaaaaatcccctctaaatctaacccagttggaggctcatcgttcctattcaggcagatgttatcgaggtccgacnnnnnnaaaccaacaacaaaaacaataaactcgatcggatacgcatgaggct

SEQ ID NO: 2931 - DNA, 146 bp, Artificial Sequence
  Bisulfite Padlock Probe
  misc_feature 93, 94, 95, 96, 97, 98: n = A,T,C or G
gactggaagagcactgttactaaaaatcctcccaaaccaacccagttggaggctcatcgttcctattcaggcagatgttatcgaggtccgacnnnnnnctctcaaaactcgatcaaacaacccctagatcggatacgcatgaggct

SEQ ID NO: 2932 - DNA, 146 bp, Artificial Sequence
  Bisulfite Padlock Probe
  misc_feature 93, 94, 95, 96, 97, 98: n = A,T,C or G
gactggaagagcactgttactaaaaatcctcccaaaccaacccagttggaggctcatcgttcctattcaggcagatgttatcgaggtccgacnnnnnnctctcaaaactcgatcaaacgacccctagatcggatacgcatgaggct

SEQ ID NO: 2933 - DNA, 146 bp, Artificial Sequence
  Bisulfite Padlock Probe
  misc_feature 95, 96, 97, 98, 99, 100: n = A,T,C or G
gactggaagagcactgttactaaaaattcgcctacaaaaccccttcgttggaggctcatcgttcctattcaggcagatgttatcgaggtccgacnnnnnnaacccaaaacccgctacgaaaaacacgatcggatacgcatgaggct

SEQ ID NO: 2934 - DNA, 146 bp, Artificial Sequence
  Bisulfite Padlock Probe
  misc_feature 95, 96, 97, 98, 99, 100: n = A,T,C or G
gactggaagagcactgttactaaaaattcgcctacgaaaccccttcgttggaggctcatcgttcctattcaggcagatgttatcgaggtccgacnnnnnnaacccaaaacccgctacgaaaaacgcgatcggatacgcatgaggct

SEQ ID NO: 2935 - DNA, 146 bp, Artificial Sequence
  Bisulfite Padlock Probe
  misc_feature 94, 95, 96, 97, 98, 99: n = A,T,C or G
gactggaagagcactgttactaaaacccaacctatctccttctccgttggaggctcatcgttcctattcaggcagatgttatcgaggtccgacnnnnnnaattacgtaacgcccttcaaactatatgatcggatacgcatgaggct

SEQ ID NO: 2936 - DNA, 146 bp, Artificial Sequence
  Bisulfite Padlock Probe
  misc_feature 94, 95, 96, 97, 98, 99: n = A,T,C or G
gactggaagagcactgttactaaaacccgacctatctccttctccgttggaggctcatcgttcctattcaggcagatgttatcgaggtccgacnnnnnnaattacgtaacgcccttcgaactatatgatcggatacgcatgaggct

SEQ ID NO: 2937 - DNA, 146 bp, Artificial Sequence
  Bisulfite Padlock Probe
  misc_feature 95, 96, 97, 98, 99, 100: n = A,T,C or G
gactggaagagcactgttactaaaacgcaaacccaaataaatcccagttggaggctcatcgttcctattcaggcagatgttatcgaggtccgacnnnnnncccgcccgaacgaaaacaaacaaaaagatcggatacgcatgaggct

SEQ ID NO: 2938 - DNA, 146 bp, Artificial Sequence
  Bisulfite Padlock Probe
  misc_feature 95, 96, 97, 98, 99, 100: n = A,T,C or G
gactggaagagcactgttactaaaacgcaaacccgaataaatcccagttggaggctcatcgttcctattcaggcagatgttatcgaggtccgacnnnnnncccgcccgaacgaaaacgaacaaaaagatcggatacgcatgaggct

SEQ ID NO: 2939 - DNA, 146 bp, Artificial Sequence
  Bisulfite Padlock Probe
  misc_feature 92, 93, 94, 95, 96, 97: n = A,T,C or G
gactggaagagcactgttactaaaataatacaaaccaataaacgttggaggctcatcgttcctattcaggcagatgttatcgaggtccgacnnnnnnctcttcaaacaaaaacccaacctaaactcgatcggatacgcatgaggct

SEQ ID NO: 2940 - DNA, 146 bp, Artificial Sequence
  Bisulfite Padlock Probe
  misc_feature 92, 93, 94, 95, 96, 97: n = A,T,C or G
gactggaagagcactgttactaaaataatacgaaccaataaacgttggaggctcatcgttcctattcaggcagatgttatcgaggtccgacnnnnnnctcttcaaacaaaaacccaacctaaactcgatcggatacgcatgaggct

SEQ ID NO: 2941 - DNA, 146 bp, Artificial Sequence
  Bisulfite Padlock Probe
  misc_feature 92, 93, 94, 95, 96, 97: n = A,T,C or G
gactggaagagcactgttactaaaatcttaaccataaaactacgttggaggctcatcgttcctattcaggcagatgttatcgaggtccgacnnnnnnccctacctaactccctctccattaaatttgatcggatacgcatgaggct

SEQ ID NO: 2942 - DNA, 146 bp, Artificial Sequence
  Bisulfite Padlock Probe
  misc_feature 92, 93, 94, 95, 96, 97: n = A,T,C or G
gactggaagagcactgttactaaaattaaatccccttttccccgttggaggctcatcgttcctattcaggcagatgttatcgaggtccgacnnnnnncaaaaactaccccctctacatccactacagatcggatacgcatgaggct

SEQ ID NO: 2943 - DNA, 146 bp, Artificial Sequence
  Bisulfite Padlock Probe
  misc_feature 94, 95, 96, 97, 98, 99: n = A,T,C or G
gactggaagagcactgttactaaaattaaccaaacactcctcccagttggaggctcatcgttcctattcaggcagatgttatcgaggtccgacnnnnnnaccaacacacttacctataataaaaacgatcggatacgcatgaggct

SEQ ID NO: 2944 - DNA, 146 bp, Artificial Sequence
  Bisulfite Padlock Probe
  misc_feature 94, 95, 96, 97, 98, 99: n = A,T,C or G
gactggaagagcactgttactaaaattaaccaaacgctcctcccagttggaggctcatcgttcctattcaggcagatgttatcgaggtccgacnnnnnnaccaacacacttacctataataaaaacgatcggatacgcatgaggct

SEQ ID NO: 2945 - DNA, 146 bp, Artificial Sequence
  Bisulfite Padlock Probe
  misc_feature 93, 94, 95, 96, 97, 98: n = A,T,C or G
gactggaagagcactgttactaaaattcccccaaacactaaaaagttggaggctcatcgttcctattcaggcagatgttatcgaggtccgacnnnnnnatcataatcaacaacgacgcctcaaccagatcggatacgcatgaggct

SEQ ID NO: 2946 - DNA, 146 bp, Artificial Sequence
  Bisulfite Padlock Probe
  misc_feature 93, 94, 95, 96, 97, 98: n = A,T,C or G
gactggaagagcactgttactaaaattcccccaaacactaaaaagttggaggctcatcgttcctattcaggcagatgttatcgaggtccgacnnnnnnatcataatcaacaacgacgcctcgaccagatcggatacgcatgaggct

SEQ ID NO: 2947 - DNA, 146 bp, Artificial Sequence
  Bisulfite Padlock Probe
  misc_feature 95, 96, 97, 98, 99, 100: n = A,T,C or G
gactggaagagcactgttactaaacaaacaacaacactcaaaacccgttggaggctcatcgttcctattcaggcagatgttatcgaggtccgacnnnnnnttctcccacaccgaaatcaccactacgatcggatacgcatgaggct

SEQ ID NO: 2948 - DNA, 146 bp, Artificial Sequence
  Bisulfite Padlock Probe
  misc_feature 95, 96, 97, 98, 99, 100: n = A,T,C or G
gactggaagagcactgttactaaacaaacgacaacactcaaaacccgttggaggctcatcgttcctattcaggcagatgttatcgaggtccgacnnnnnnttctcccacaccgaaatcgccactacgatcggatacgcatgaggct

SEQ ID NO: 2949 - DNA, 146 bp, Artificial Sequence
  Bisulfite Padlock Probe
  misc_feature 96, 97, 98, 99, 100, 101: n = A,T,C or G
gactggaagagcactgttactaaacatcctaaaccccaacaaattcagttggaggctcatcgttcctattcaggcagatgttatcgaggtccgacnnnnnncccaaccaaattcgaaacccacaccgatcggatacgcatgaggct

SEQ ID NO: 2950 - DNA, 146 bp, Artificial Sequence
  Bisulfite Padlock Probe
  misc_feature 96, 97, 98, 99, 100, 101: n = A,T,C or G
gactggaagagcactgttactaaacatcctaaaccccaacaaattcagttggaggctcatcgttcctattcaggcagatgttatcgaggtccgacnnnnnncccaaccaaattcgaaacccgcaccgatcggatacgcatgaggct

SEQ ID NO: 2951 - DNA, 146 bp, Artificial Sequence
  Bisulfite Padlock Probe
  misc_feature 96, 97, 98, 99, 100, 101: n = A,T,C or G
gactggaagagcactgttactaaacatttaactacatacctcaatttgttggaggctcatcgttcctattcaggcagatgttatcgaggtccgacnnnnnnaacgactaccctaccaaacgcatacgatcggatacgcatgaggct

SEQ ID NO: 2952 - DNA, 146 bp, Artificial Sequence
  Bisulfite Padlock Probe
  misc_feature 96, 97, 98, 99, 100, 101: n = A,T,C or G
gactggaagagcactgttactaaacatttaactacgtacctcaatttgttggaggctcatcgttcctattcaggcagatgttatcgaggtccgacnnnnnnaacgactaccctaccaaacgcgtacgatcggatacgcatgaggct

SEQ ID NO: 2953 - DNA, 146 bp, Artificial Sequence
  Bisulfite Padlock Probe
  misc_feature 96, 97, 98, 99, 100, 101: n = A,T,C or G
gactggaagagcactgttactaaaccctcaaaacctaatcaaaataagttggaggctcatcgttcctattcaggcagatgttatcgaggtccgacnnnnnnacaaaaatataaccatctaaaaaccgatcggatacgcatgaggct

SEQ ID NO: 2954 - DNA, 146 bp, Artificial Sequence
  Bisulfite Padlock Probe
  misc_feature 95, 96, 97, 98, 99, 100: n = A,T,C or G
gactggaagagcactgttactaaacctaaacaaaccaatacccaaagttggaggctcatcgttcctattcaggcagatgttatcgaggtccgacnnnnnntccataaacaaataatcctaactctcgatcggatacgcatgaggct

SEQ ID NO: 2955 - DNA, 146 bp, Artificial Sequence
  Bisulfite Padlock Probe
  misc_feature 95, 96, 97, 98, 99, 100: n = A,T,C or G
gactggaagagcactgttactaaacctaaacaaaccgatacccaaagttggaggctcatcgttcctattcaggcagatgttatcgaggtccgacnnnnnntccataaacaaataatcctaactctcgatcggatacgcatgaggct

SEQ ID NO: 2956 - DNA, 146 bp, Artificial Sequence
  Bisulfite Padlock Probe
  misc_feature 92, 93, 94, 95, 96, 97: n = A,T,C or G
gactggaagagcactgttactaaacgacatctcaaccaaaaacgttggaggctcatcgttcctattcaggcagatgttatcgaggtccgacnnnnnnatcaactccataacaaacactacaaaaccgatcggatacgcatgaggct

SEQ ID NO: 2957 - DNA, 146 bp, Artificial Sequence
  Bisulfite Padlock Probe
  misc_feature 92, 93, 94, 95, 96, 97: n = A,T,C or G
gactggaagagcactgttactaaacgacatctcgaccaaaaacgttggaggctcatcgttcctattcaggcagatgttatcgaggtccgacnnnnnnatcaactccataacaaacactacaaaaccgatcggatacgcatgaggct

SEQ ID NO: 2958 - DNA, 146 bp, Artificial Sequence
  Bisulfite Padlock Probe
  misc_feature 93, 94, 95, 96, 97, 98: n = A,T,C or G
gactggaagagcactgttactaaacgcactctctcattttctttgttggaggctcatcgttcctattcaggcagatgttatcgaggtccgacnnnnnnacctcacgaacccgcaataaccaataacgatcggatacgcatgaggct

SEQ ID NO: 2959 - DNA, 146 bp, Artificial Sequence
  Bisulfite Padlock Probe
  misc_feature 92, 93, 94, 95, 96, 97: n = A,T,C or G
gactggaagagcactgttactaaacgcctaacaacaaaacaccgttggaggctcatcgttcctattcaggcagatgttatcgaggtccgacnnnnnnaaattccctcccctcctaacaaaaaccttgatcggatacgcatgaggct

SEQ ID NO: 2960 - DNA, 146 bp, Artificial Sequence
  Bisulfite Padlock Probe
  misc_feature 92, 93, 94, 95, 96, 97: n = A,T,C or G
gactggaagagcactgttactaaacgcctaacaacaaaacgccgttggaggctcatcgttcctattcaggcagatgttatcgaggtccgacnnnnnnaaattccctcccctcctaacgaaaaccttgatcggatacgcatgaggct

SEQ ID NO: 2961 - DNA, 146 bp, Artificial Sequence
  Bisulfite Padlock Probe
  misc_feature 93, 94, 95, 96, 97, 98: n = A,T,C or G
gactggaagagcactgttactaaacgcgctctctcattttctttgttggaggctcatcgttcctattcaggcagatgttatcgaggtccgacnnnnnnacctcacgaacccgcaataaccgataacgatcggatacgcatgaggct

SEQ ID NO: 2962 - DNA, 146 bp, Artificial Sequence
  Bisulfite Padlock Probe
  misc_feature 93, 94, 95, 96, 97, 98: n = A,T,C or G
gactggaagagcactgttactaaataaactctaaaaacacaactgttggaggctcatcgttcctattcaggcagatgttatcgaggtccgacnnnnnnaaaaactataaacaacaaaaataactacgatcggatacgcatgaggct

SEQ ID NO: 2963 - DNA, 146 bp, Artificial Sequence
  Bisulfite Padlock Probe
  misc_feature 94, 95, 96, 97, 98, 99: n = A,T,C or G
gactggaagagcactgttactaaataaccgaacctacaaactaaagttggaggctcatcgttcctattcaggcagatgttatcgaggtccgacnnnnnnaaaaataaataaattacaatttctctcgatcggatacgcatgaggct

SEQ ID NO: 2964 - DNA, 146 bp, Artificial Sequence
  Bisulfite Padlock Probe
  misc_feature 94, 95, 96, 97, 98, 99: n = A,T,C or G
gactggaagagcactgttactaaataaccgaacctacgaactaaagttggaggctcatcgttcctattcaggcagatgttatcgaggtccgacnnnnnnaaaaataaataaattacaatttctctcgatcggatacgcatgaggct

SEQ ID NO: 2965 - DNA, 146 bp, Artificial Sequence
  Bisulfite Padlock Probe
  misc_feature 96, 97, 98, 99, 100, 101: n = A,T,C or G
gactggaagagcactgttactaaataactacctccatatcctccctcgttggaggctcatcgttcctattcaggcagatgttatcgaggtccgacnnnnnnaacctaaactcttaaactcaaccccgatcggatacgcatgaggct

SEQ ID NO: 2966 - DNA, 146 bp, Artificial Sequence
  Bisulfite Padlock Probe
  misc_feature 96, 97, 98, 99, 100, 101: n = A,T,C or G
gactggaagagcactgttactaaatacaaataaacaaacacaaataagttggaggctcatcgttcctattcaggcagatgttatcgaggtccgacnnnnnnaaaaatataaaatcacctaaaccacgatcggatacgcatgaggct

SEQ ID NO: 2967 - DNA, 146 bp, Artificial Sequence
  Bisulfite Padlock Probe
  misc_feature 96, 97, 98, 99, 100, 101: n = A,T,C or G
gactggaagagcactgttactaaatacaaataaacaaacgcaaataagttggaggctcatcgttcctattcaggcagatgttatcgaggtccgacnnnnnnaaaaatataaaatcacctaaaccacgatcggatacgcatgaggct

SEQ ID NO: 2968 - DNA, 146 bp, Artificial Sequence
  Bisulfite Padlock Probe
  misc_feature 94, 95, 96, 97, 98, 99: n = A,T,C or G
gactggaagagcactgttactaaatacttcttacctacataaaaagttggaggctcatcgttcctattcaggcagatgttatcgaggtccgacnnnnnnattcgttatacacaataaaacaaatccgatcggatacgcatgaggct

SEQ ID NO: 2969 - DNA, 146 bp, Artificial Sequence
  Bisulfite Padlock Probe
  misc_feature 94, 95, 96, 97, 98, 99: n = A,T,C or G
gactggaagagcactgttactaaatacttcttacctacgtaaaaagttggaggctcatcgttcctattcaggcagatgttatcgaggtccgacnnnnnnattcgttatacgcaataaaacaaatccgatcggatacgcatgaggct

SEQ ID NO: 2970 - DNA, 146 bp, Artificial Sequence
  Bisulfite Padlock Probe
  misc_feature 92, 93, 94, 95, 96, 97: n = A,T,C or G
gactggaagagcactgttactaaatttaacgtcacaaacccaagttggaggctcatcgttcctattcaggcagatgttatcgaggtccgacnnnnnnttcttaatctaaataatttaaaactaacagatcggatacgcatgaggct

SEQ ID NO: 2971 - DNA, 146 bp, Artificial Sequence
  Bisulfite Padlock Probe
  misc_feature 92, 93, 94, 95, 96, 97: n = A,T,C or G
gactggaagagcactgttactaaatttaacgtcacgaacccaagttggaggctcatcgttcctattcaggcagatgttatcgaggtccgacnnnnnnttcttaatctaaataatttaaaactaacagatcggatacgcatgaggct

SEQ ID NO: 2972 - DNA, 146 bp, Artificial Sequence
  Bisulfite Padlock Probe
  misc_feature 96, 97, 98, 99, 100, 101: n = A,T,C or G
gactggaagagcactgttactaaatttcattctattccaaaaacaacgttggaggctcatcgttcctattcaggcagatgttatcgaggtccgacnnnnnnctctccaaacctccatattcttatcgatcggatacgcatgaggct

SEQ ID NO: 2973 - DNA, 146 bp, Artificial Sequence
  Bisulfite Padlock Probe
  misc_feature 96, 97, 98, 99, 100, 101: n = A,T,C or G
gactggaagagcactgttactaaatttcattctattccgaaaacaacgttggaggctcatcgttcctattcaggcagatgttatcgaggtccgacnnnnnnctctccgaacctccatattcttatcgatcggatacgcatgaggct

SEQ ID NO: 2974 - DNA, 146 bp, Artificial Sequence
  Bisulfite Padlock Probe
  misc_feature 93, 94, 95, 96, 97, 98: n = A,T,C or G
gactggaagagcactgttactaaatttccacatctataaaactagttggaggctcatcgttcctattcaggcagatgttatcgaggtccgacnnnnnncctcccctaaccctaaccctaacctctagatcggatacgcatgaggct

SEQ ID NO: 2975 - DNA, 146 bp, Artificial Sequence
  Bisulfite Padlock Probe
  misc_feature 92, 93, 94, 95, 96, 97: n = A,T,C or G
gactggaagagcactgttactaaccctcctaccactacttaacgttggaggctcatcgttcctattcaggcagatgttatcgaggtccgacnnnnnnctactccaccaaatactcataattctcctgatcggatacgcatgaggct

SEQ ID NO: 2976 - DNA, 146 bp, Artificial Sequence
  Bisulfite Padlock Probe
  misc_feature 92, 93, 94, 95, 96, 97: n = A,T,C or G
gactggaagagcactgttactaaccctcctaccgctacttaacgttggaggctcatcgttcctattcaggcagatgttatcgaggtccgacnnnnnnctactccaccaaatactcgtaattctcctgatcggatacgcatgaggct

SEQ ID NO: 2977 - DNA, 146 bp, Artificial Sequence
  Bisulfite Padlock Probe
  misc_feature 93, 94, 95, 96, 97, 98: n = A,T,C or G
gactggaagagcactgttactaactaacacaactcataaaccccgttggaggctcatcgttcctattcaggcagatgttatcgaggtccgacnnnnnncacgccctcacttctccaaaaataaaaagatcggatacgcatgaggct

SEQ ID NO: 2978 - DNA, 146 bp, Artificial Sequence
  Bisulfite Padlock Probe
  misc_feature 93, 94, 95, 96, 97, 98: n = A,T,C or G
gactggaagagcactgttactaactaacacaactcgtaaaccccgttggaggctcatcgttcctattcaggcagatgttatcgaggtccgacnnnnnncacgccctcacttctccgaaaataaaaagatcggatacgcatgaggct

SEQ ID NO: 2979 - DNA, 146 bp, Artificial Sequence
  Bisulfite Padlock Probe
  misc_feature 96, 97, 98, 99, 100, 101: n = A,T,C or G
gactggaagagcactgttactaactacactcaacacacttaaaacaagttggaggctcatcgttcctattcaggcagatgttatcgaggtccgacnnnnnnaataaccttctccctaaacaaaaccgatcggatacgcatgaggct

SEQ ID NO: 2980 - DNA, 146 bp, Artificial Sequence
  Bisulfite Padlock Probe
  misc_feature 96, 97, 98, 99, 100, 101: n = A,T,C or G
gactggaagagcactgttactaactacactcgacacacttaaaacaagttggaggctcatcgttcctattcaggcagatgttatcgaggtccgacnnnnnnaataaccttctccctaaacaaaaccgatcggatacgcatgaggct

SEQ ID NO: 2981 - DNA, 146 bp, Artificial Sequence
  Bisulfite Padlock Probe
  misc_feature 94, 95, 96, 97, 98, 99: n = A,T,C or G
gactggaagagcactgttactaactataccaacccttccccaaaagttggaggctcatcgttcctattcaggcagatgttatcgaggtccgacnnnnnnccaactaccttctaccaaaacctaaacgatcggatacgcatgaggct

SEQ ID NO: 2982 - DNA, 146 bp, Artificial Sequence
  Bisulfite Padlock Probe
  misc_feature 94, 95, 96, 97, 98, 99: n = A,T,C or G
gactggaagagcactgttactaactataccgacccttccccaaaagttggaggctcatcgttcctattcaggcagatgttatcgaggtccgacnnnnnnccaactaccttctaccaaaacctaaacgatcggatacgcatgaggct

SEQ ID NO: 2983 - DNA, 146 bp, Artificial Sequence
  Bisulfite Padlock Probe
  misc_feature 92, 93, 94, 95, 96, 97: n = A,T,C or G
gactggaagagcactgttactaactccttcctctcgaccaaacgttggaggctcatcgttcctattcaggcagatgttatcgaggtccgacnnnnnnaaaaactcccgacccaataaacttaaaaagatcggatacgcatgaggct

SEQ ID NO: 2984 - DNA, 146 bp, Artificial Sequence
  Bisulfite Padlock Probe
  misc_feature 92, 93, 94, 95, 96, 97: n = A,T,C or G
gactggaagagcactgttactaactccttcctctcgaccgaacgttggaggctcatcgttcctattcaggcagatgttatcgaggtccgacnnnnnnaaaaactcccgacccgataaacttaaaaagatcggatacgcatgaggct

SEQ ID NO: 2985 - DNA, 146 bp, Artificial Sequence
  Bisulfite Padlock Probe
  misc_feature 93, 94, 95, 96, 97, 98: n = A,T,C or G
gactggaagagcactgttactaactctcccgcctcaaaactaaagttggaggctcatcgttcctattcaggcagatgttatcgaggtccgacnnnnnnacccttaaaccaaccttaaccactacccgatcggatacgcatgaggct

SEQ ID NO: 2986 - DNA, 146 bp, Artificial Sequence
  Bisulfite Padlock Probe
  misc_feature 93, 94, 95, 96, 97, 98: n = A,T,C or G
gactggaagagcactgttactaactctcccgcctcgaaactaaagttggaggctcatcgttcctattcaggcagatgttatcgaggtccgacnnnnnnacccttaaaccaaccttaaccgctacccgatcggatacgcatgaggct

SEQ ID NO: 2987 - DNA, 146 bp, Artificial Sequence
  Bisulfite Padlock Probe
  misc_feature 96, 97, 98, 99, 100, 101: n = A,T,C or G
gactggaagagcactgttactaataaaaacgcgaatcgactacgacagttggaggctcatcgttcctattcaggcagatgttatcgaggtccgacnnnnnnaccacaaaactcttcgcgatacccagatcggatacgcatgaggct

SEQ ID NO: 2988 - DNA, 146 bp, Artificial Sequence
  Bisulfite Padlock Probe
  misc_feature 96, 97, 98, 99, 100, 101: n = A,T,C or G
gactggaagagcactgttactaataaaaacgcgaatcgactacgacggttggaggctcatcgttcctattcaggcagatgttatcgaggtccgacnnnnnnaccacaaaactcttcgcgatacccggatcggatacgcatgaggct

SEQ ID NO: 2989 - DNA, 146 bp, Artificial Sequence
  Bisulfite Padlock Probe
  misc_feature 96, 97, 98, 99, 100, 101: n = A,T,C or G
gactggaagagcactgttactaataaaatacactaataaaatactatgttggaggctcatcgttcctattcaggcagatgttatcgaggtccgacnnnnnnacctcctccacatcttcaacccttcgatcggatacgcatgaggct

SEQ ID NO: 2990 - DNA, 146 bp, Artificial Sequence
  Bisulfite Padlock Probe
  misc_feature 96, 97, 98, 99, 100, 101: n = A,T,C or G
gactggaagagcactgttactaataaaatacactaataaaatactatgttggaggctcatcgttcctattcaggcagatgttatcgaggtccgacnnnnnnacctcctccgcatcttcaacccttcgatcggatacgcatgaggct

SEQ ID NO: 2991 - DNA, 146 bp, Artificial Sequence
  Bisulfite Padlock Probe
  misc_feature 92, 93, 94, 95, 96, 97: n = A,T,C or G
gactggaagagcactgttactaatacaaaaacataaaattcccgttggaggctcatcgttcctattcaggcagatgttatcgaggtccgacnnnnnntaaaccgaaactaaaacgcaaacaattaagatcggatacgcatgaggct

SEQ ID NO: 2992 - DNA, 146 bp, Artificial Sequence
  Bisulfite Padlock Probe
  misc_feature 92, 93, 94, 95, 96, 97: n = A,T,C or G
gactggaagagcactgttactaatacaaaaacgtaaaattcccgttggaggctcatcgttcctattcaggcagatgttatcgaggtccgacnnnnnntaaaccgaaactaaaacgcaaacgattaagatcggatacgcatgaggct

SEQ ID NO: 2993 - DNA, 146 bp, Artificial Sequence
  Bisulfite Padlock Probe
  misc_feature 92, 93, 94, 95, 96, 97: n = A,T,C or G
gactggaagagcactgttactaatacctacaaaccctctcaccgttggaggctcatcgttcctattcaggcagatgttatcgaggtccgacnnnnnnaaaaacgaaactacaactaacgcaaactagatcggatacgcatgaggct

SEQ ID NO: 2994 - DNA, 146 bp, Artificial Sequence
  Bisulfite Padlock Probe
  misc_feature 92, 93, 94, 95, 96, 97: n = A,T,C or G
gactggaagagcactgttactaatacctacaaaccctctcaccgttggaggctcatcgttcctattcaggcagatgttatcgaggtccgacnnnnnnaaaaacgaaactacaactaacgcgaactagatcggatacgcatgaggct

SEQ ID NO: 2995 - DNA, 146 bp, Artificial Sequence
  Bisulfite Padlock Probe
  misc_feature 92, 93, 94, 95, 96, 97: n = A,T,C or G
gactggaagagcactgttactaatactattaacgtcaaactccgttggaggctcatcgttcctattcaggcagatgttatcgaggtccgacnnnnnnaacccaaaacgcctctaccttactcaaacgatcggatacgcatgaggct

SEQ ID NO: 2996 - DNA, 146 bp, Artificial Sequence
  Bisulfite Padlock Probe
  misc_feature 92, 93, 94, 95, 96, 97: n = A,T,C or G
gactggaagagcactgttactaatactattaacgtcgaactccgttggaggctcatcgttcctattcaggcagatgttatcgaggtccgacnnnnnnaacccaaaacgcctctaccttactcgaacgatcggatacgcatgaggct

SEQ ID NO: 2997 - DNA, 146 bp, Artificial Sequence
  Bisulfite Padlock Probe
  misc_feature 94, 95, 96, 97, 98, 99: n = A,T,C or G
gactggaagagcactgttactaatccgtcccaatcctcaaactccgttggaggctcatcgttcctattcaggcagatgttatcgaggtccgacnnnnnnaacaatcgaaacctataacacacaaaagatcggatacgcatgaggct

SEQ ID NO: 2998 - DNA, 146 bp, Artificial Sequence
  Bisulfite Padlock Probe
  misc_feature 94, 95, 96, 97, 98, 99: n = A,T,C or G
gactggaagagcactgttactaatccgtcccaatcctcgaactccgttggaggctcatcgttcctattcaggcagatgttatcgaggtccgacnnnnnnaacaatcgaaacctataacgcacaaaagatcggatacgcatgaggct

SEQ ID NO: 2999 - DNA, 146 bp, Artificial Sequence
  Bisulfite Padlock Probe
  misc_feature 95, 96, 97, 98, 99, 100: n = A,T,C or G
gactggaagagcactgttactaatctccgcgaccgaaaaacaaaaagttggaggctcatcgttcctattcaggcagatgttatcgaggtccgacnnnnnncctaccaactccgcttccaaaaaccagatcggatacgcatgaggct

SEQ ID NO: 3000 - DNA, 146 bp, Artificial Sequence
  Bisulfite Padlock Probe
  misc_feature 95, 96, 97, 98, 99, 100: n = A,T,C or G
gactggaagagcactgttactaatctccgcgaccgaaaaacgaaaagttggaggctcatcgttcctattcaggcagatgttatcgaggtccgacnnnnnncctaccaactccgcttccgaaaaccagatcggatacgcatgaggct

SEQ ID NO: 3001 - DNA, 146 bp, Artificial Sequence
  Bisulfite Padlock Probe
  misc_feature 93, 94, 95, 96, 97, 98: n = A,T,C or G
gactggaagagcactgttactacaaaacatcccaatttatacccgttggaggctcatcgttcctattcaggcagatgttatcgaggtccgacnnnnnncttctaacctccccaaaacccaaataaagatcggatacgcatgaggct

SEQ ID NO: 3002 - DNA, 146 bp, Artificial Sequence
  Bisulfite Padlock Probe
  misc_feature 93, 94, 95, 96, 97, 98: n = A,T,C or G
gactggaagagcactgttactacaaaacgtcccaatttatacccgttggaggctcatcgttcctattcaggcagatgttatcgaggtccgacnnnnnncttctaacctccccaaaacccaaataaagatcggatacgcatgaggct

SEQ ID NO: 3003 - DNA, 146 bp, Artificial Sequence
  Bisulfite Padlock Probe
  misc_feature 95, 96, 97, 98, 99, 100: n = A,T,C or G
gactggaagagcactgttactacaaaccataaattcaccctcctccgttggaggctcatcgttcctattcaggcagatgttatcgaggtccgacnnnnnntcttctcactatccttcaacattttcgatcggatacgcatgaggct

SEQ ID NO: 3004 - DNA, 146 bp, Artificial Sequence
  Bisulfite Padlock Probe
  misc_feature 95, 96, 97, 98, 99, 100: n = A,T,C or G
gactggaagagcactgttactacaaaccataaattcgccctcctccgttggaggctcatcgttcctattcaggcagatgttatcgaggtccgacnnnnnntcttctcgctatccttcaacattttcgatcggatacgcatgaggct

SEQ ID NO: 3005 - DNA, 146 bp, Artificial Sequence
  Bisulfite Padlock Probe
  misc_feature 92, 93, 94, 95, 96, 97: n = A,T,C or G
gactggaagagcactgttactacaacacgcgacacaaataaccgttggaggctcatcgttcctattcaggcagatgttatcgaggtccgacnnnnnnaacctacgaaactcactaaaaaccaatttgatcggatacgcatgaggct

SEQ ID NO: 3006 - DNA, 146 bp, Artificial Sequence
  Bisulfite Padlock Probe
  misc_feature 92, 93, 94, 95, 96, 97: n = A,T,C or G
gactggaagagcactgttactacaacacgcgacgcaaataaccgttggaggctcatcgttcctattcaggcagatgttatcgaggtccgacnnnnnnaacctacgaaactcgctaaaaaccaatttgatcggatacgcatgaggct

SEQ ID NO: 3007 - DNA, 146 bp, Artificial Sequence
  Bisulfite Padlock Probe
  misc_feature 92, 93, 94, 95, 96, 97: n = A,T,C or G
gactggaagagcactgttactacaactacttctacaacaaaaagttggaggctcatcgttcctattcaggcagatgttatcgaggtccgacnnnnnnaaaaacaaaactatatctaacctcaaaaagatcggatacgcatgaggct

SEQ ID NO: 3008 - DNA, 146 bp, Artificial Sequence
  Bisulfite Padlock Probe
  misc_feature 94, 95, 96, 97, 98, 99: n = A,T,C or G
gactggaagagcactgttactacaacttcaacttctattaacactgttggaggctcatcgttcctattcaggcagatgttatcgaggtccgacnnnnnnaaacccaaacaatttttccaaacaaccgatcggatacgcatgaggct

SEQ ID NO: 3009 - DNA, 146 bp, Artificial Sequence
  Bisulfite Padlock Probe
  misc_feature 94, 95, 96, 97, 98, 99: n = A,T,C or G
gactggaagagcactgttactacaacttcaacttctattaacactgttggaggctcatcgttcctattcaggcagatgttatcgaggtccgacnnnnnnaaacccaaacaatttttccgaacaaccgatcggatacgcatgaggct

SEQ ID NO: 3010 - DNA, 146 bp, Artificial Sequence
  Bisulfite Padlock Probe
  misc_feature 95, 96, 97, 98, 99, 100: n = A,T,C or G
gactggaagagcactgttactacacgatcccgaataaccacaaaaagttggaggctcatcgttcctattcaggcagatgttatcgaggtccgacnnnnnnccgaaccctaaatcccaaccattaacgatcggatacgcatgaggct

SEQ ID NO: 3011 - DNA, 146 bp, Artificial Sequence
  Bisulfite Padlock Probe
  misc_feature 95, 96, 97, 98, 99, 100: n = A,T,C or G
gactggaagagcactgttactacacgatcccgaataaccgcaaaaagttggaggctcatcgttcctattcaggcagatgttatcgaggtccgacnnnnnnccgaaccctaaatcccgaccattaacgatcggatacgcatgaggct

SEQ ID NO: 3012 - DNA, 146 bp, Artificial Sequence
  Bisulfite Padlock Probe
  misc_feature 93, 94, 95, 96, 97, 98: n = A,T,C or G
gactggaagagcactgttactacacttatatataaatatatcccgttggaggctcatcgttcctattcaggcagatgttatcgaggtccgacnnnnnnactataaccatctctttccaccctaaaagatcggatacgcatgaggct

SEQ ID NO: 3013 - DNA, 146 bp, Artificial Sequence
  Bisulfite Padlock Probe
  misc_feature 94, 95, 96, 97, 98, 99: n = A,T,C or G
gactggaagagcactgttactacacttccaaataaaacctaaaacgttggaggctcatcgttcctattcaggcagatgttatcgaggtccgacnnnnnnaactaaaaacaaccgaccgacaatcccgatcggatacgcatgaggct

SEQ ID NO: 3014 - DNA, 146 bp, Artificial Sequence
  Bisulfite Padlock Probe
  misc_feature 92, 93, 94, 95, 96, 97: n = A,T,C or G
gactggaagagcactgttactaccaaactctcctacccctcacgttggaggctcatcgttcctattcaggcagatgttatcgaggtccgacnnnnnnacccaacacccatataaaactacctcaccgatcggatacgcatgaggct

SEQ ID NO: 3015 - DNA, 146 bp, Artificial Sequence
  Bisulfite Padlock Probe
  misc_feature 95, 96, 97, 98, 99, 100: n = A,T,C or G
gactggaagagcactgttactaccacgacgacgctaaaatccaaatgttggaggctcatcgttcctattcaggcagatgttatcgaggtccgacnnnnnnaaatataacaactatacaaacccttagatcggatacgcatgaggct

SEQ ID NO: 3016 - DNA, 146 bp, Artificial Sequence
  Bisulfite Padlock Probe
  misc_feature 95, 96, 97, 98, 99, 100: n = A,T,C or G
gactggaagagcactgttactaccacgacgacgctaaaatccgaatgttggaggctcatcgttcctattcaggcagatgttatcgaggtccgacnnnnnnaaatataacaactatacaaacccttagatcggatacgcatgaggct

SEQ ID NO: 3017 - DNA, 146 bp, Artificial Sequence
  Bisulfite Padlock Probe
  misc_feature 92, 93, 94, 95, 96, 97: n = A,T,C or G
gactggaagagcactgttactaccattcctttcaaaaataaccgttggaggctcatcgttcctattcaggcagatgttatcgaggtccgacnnnnnnctaccctaaacccgcaaataccacaaaaagatcggatacgcatgaggct

SEQ ID NO: 3018 - DNA, 146 bp, Artificial Sequence
  Bisulfite Padlock Probe
  misc_feature 92, 93, 94, 95, 96, 97: n = A,T,C or G
gactggaagagcactgttactaccattcctttcgaaaataaccgttggaggctcatcgttcctattcaggcagatgttatcgaggtccgacnnnnnnctaccctaaacccgcaaataccgcaaaaagatcggatacgcatgaggct

SEQ ID NO: 3019 - DNA, 146 bp, Artificial Sequence
  Bisulfite Padlock Probe
  misc_feature 93, 94, 95, 96, 97, 98: n = A,T,C or G
gactggaagagcactgttactacccaacatctctcaacaaccccgttggaggctcatcgttcctattcaggcagatgttatcgaggtccgacnnnnnnctccacccgacctactaccaactcaatagatcggatacgcatgaggct

SEQ ID NO: 3020 - DNA, 146 bp, Artificial Sequence
  Bisulfite Padlock Probe
  misc_feature 93, 94, 95, 96, 97, 98: n = A,T,C or G
gactggaagagcactgttactacccatttctccctccacctatcgttggaggctcatcgttcctattcaggcagatgttatcgaggtccgacnnnnnnaaaaccaaaaatccctttaaactaaacagatcggatacgcatgaggct

SEQ ID NO: 3021 - DNA, 146 bp, Artificial Sequence
  Bisulfite Padlock Probe
  misc_feature 93, 94, 95, 96, 97, 98: n = A,T,C or G
gactggaagagcactgttactacccatttctccctccgcctatcgttggaggctcatcgttcctattcaggcagatgttatcgaggtccgacnnnnnnaaaaccgaaaatccctttaaactaaacagatcggatacgcatgaggct

SEQ ID NO: 3022 - DNA, 146 bp, Artificial Sequence
  Bisulfite Padlock Probe
  misc_feature 93, 94, 95, 96, 97, 98: n = A,T,C or G
gactggaagagcactgttactaccccctaatatccacaaccctagttggaggctcatcgttcctattcaggcagatgttatcgaggtccgacnnnnnnaaaaatctcaaaaccctaaaatcccaccgatcggatacgcatgaggct

SEQ ID NO: 3023 - DNA, 146 bp, Artificial Sequence
  Bisulfite Padlock Probe
  misc_feature 93, 94, 95, 96, 97, 98: n = A,T,C or G
gactggaagagcactgttactaccccctaatatccgcaaccctagttggaggctcatcgttcctattcaggcagatgttatcgaggtccgacnnnnnnaaaaatctcgaaaccctaaaatcccaccgatcggatacgcatgaggct

SEQ ID NO: 3024 - DNA, 146 bp, Artificial Sequence
  Bisulfite Padlock Probe
  misc_feature 93, 94, 95, 96, 97, 98: n = A,T,C or G
gactggaagagcactgttactacccgacatctctcaacaaccccgttggaggctcatcgttcctattcaggcagatgttatcgaggtccgacnnnnnnctccacccgacctactaccgactcaatagatcggatacgcatgaggct

SEQ ID NO: 3025 - DNA, 146 bp, Artificial Sequence
  Bisulfite Padlock Probe
  misc_feature 92, 93, 94, 95, 96, 97: n = A,T,C or G
gactggaagagcactgttactaccctaactataaccactataagttggaggctcatcgttcctattcaggcagatgttatcgaggtccgacnnnnnnaaaactaccatacctaacctcaatctattgatcggatacgcatgaggct

SEQ ID NO: 3026 - DNA, 146 bp, Artificial Sequence
  Bisulfite Padlock Probe
  misc_feature 92, 93, 94, 95, 96, 97: n = A,T,C or G
gactggaagagcactgttactaccctaactataaccgctataagttggaggctcatcgttcctattcaggcagatgttatcgaggtccgacnnnnnnaaaactaccatacctaacctcgatctattgatcggatacgcatgaggct

SEQ ID NO: 3027 - DNA, 146 bp, Artificial Sequence
  Bisulfite Padlock Probe
  misc_feature 95, 96, 97, 98, 99, 100: n = A,T,C or G
gactggaagagcactgttactaccctcccaattcctaaaaaccaaagttggaggctcatcgttcctattcaggcagatgttatcgaggtccgacnnnnnnaaaaacctaatttctcttaacaaaaagatcggatacgcatgaggct

SEQ ID NO: 3028 - DNA, 146 bp, Artificial Sequence
  Bisulfite Padlock Probe
  misc_feature 95, 96, 97, 98, 99, 100: n = A,T,C or G
gactggaagagcactgttactaccctcccgattcctaaaaaccaaagttggaggctcatcgttcctattcaggcagatgttatcgaggtccgacnnnnnnaaaaacctaatttctcttaacaaaaagatcggatacgcatgaggct

SEQ ID NO: 3029 - DNA, 146 bp, Artificial Sequence
  Bisulfite Padlock Probe
  misc_feature 92, 93, 94, 95, 96, 97: n = A,T,C or G
gactggaagagcactgttactacccttcacaaaactacaaaaagttggaggctcatcgttcctattcaggcagatgttatcgaggtccgacnnnnnnaaaaactaccaaaatataacaaatactacgatcggatacgcatgaggct

SEQ ID NO: 3030 - DNA, 146 bp, Artificial Sequence
  Bisulfite Padlock Probe
  misc_feature 95, 96, 97, 98, 99, 100: n = A,T,C or G
gactggaagagcactgttactaccgaaaaccactaaacccaccaacgttggaggctcatcgttcctattcaggcagatgttatcgaggtccgacnnnnnntcccctctactactaaaacaactctcgatcggatacgcatgaggct

SEQ ID NO: 3031 - DNA, 146 bp, Artificial Sequence
  Bisulfite Padlock Probe
  misc_feature 95, 96, 97, 98, 99, 100: n = A,T,C or G
gactggaagagcactgttactaccgaaaaccgctaaacccaccaacgttggaggctcatcgttcctattcaggcagatgttatcgaggtccgacnnnnnntcccctctactactaaaacgactctcgatcggatacgcatgaggct

SEQ ID NO: 3032 - DNA, 146 bp, Artificial Sequence
  Bisulfite Padlock Probe
  misc_feature 96, 97, 98, 99, 100, 101: n = A,T,C or G
gactggaagagcactgttactaccgaacacaaacaaactacaaacccgttggaggctcatcgttcctattcaggcagatgttatcgaggtccgacnnnnnnaaaaatataaaatcaaactaacaacgatcggatacgcatgaggct

SEQ ID NO: 3033 - DNA, 146 bp, Artificial Sequence
  Bisulfite Padlock Probe
  misc_feature 96, 97, 98, 99, 100, 101: n = A,T,C or G
gactggaagagcactgttactaccgaacacaaacgaactacaaacccgttggaggctcatcgttcctattcaggcagatgttatcgaggtccgacnnnnnnaaaaatataaaatcaaactaacgacgatcggatacgcatgaggct

SEQ ID NO: 3034 - DNA, 146 bp, Artificial Sequence
  Bisulfite Padlock Probe
  misc_feature 92, 93, 94, 95, 96, 97: n = A,T,C or G
gactggaagagcactgttactaccgaactctcctacccctcacgttggaggctcatcgttcctattcaggcagatgttatcgaggtccgacnnnnnnacccaacacccatataaaactacctcaccgatcggatacgcatgaggct

SEQ ID NO: 3035 - DNA, 146 bp, Artificial Sequence
  Bisulfite Padlock Probe
  misc_feature 94, 95, 96, 97, 98, 99: n = A,T,C or G
gactggaagagcactgttactaccgaatcaccaaaatacaacctcgttggaggctcatcgttcctattcaggcagatgttatcgaggtccgacnnnnnnaaaaacgcctcttaacgtccataaaaagatcggatacgcatgaggct

SEQ ID NO: 3036 - DNA, 146 bp, Artificial Sequence
  Bisulfite Padlock Probe
  misc_feature 94, 95, 96, 97, 98, 99: n = A,T,C or G
gactggaagagcactgttactaccgaatcaccgaaatacaacctcgttggaggctcatcgttcctattcaggcagatgttatcgaggtccgacnnnnnnaaaaacgcctcttaacgtccgtaaaaagatcggatacgcatgaggct

SEQ ID NO: 3037 - DNA, 146 bp, Artificial Sequence
  Bisulfite Padlock Probe
  misc_feature 92, 93, 94, 95, 96, 97: n = A,T,C or G
gactggaagagcactgttactaccgataccaaaatacaaaaaagttggaggctcatcgttcctattcaggcagatgttatcgaggtccgacnnnnnntactctttaaccccttaaccctaaacttagatcggatacgcatgaggct

SEQ ID NO: 3038 - DNA, 146 bp, Artificial Sequence
  Bisulfite Padlock Probe
  misc_feature 92, 93, 94, 95, 96, 97: n = A,T,C or G
gactggaagagcactgttactaccgataccaaaatacgaaaaagttggaggctcatcgttcctattcaggcagatgttatcgaggtccgacnnnnnntactctttaaccccttaaccctaaacttagatcggatacgcatgaggct

SEQ ID NO: 3039 - DNA, 146 bp, Artificial Sequence
  Bisulfite Padlock Probe
  misc_feature 92, 93, 94, 95, 96, 97: n = A,T,C or G
gactggaagagcactgttactaccgcaaatcccccacttaaaagttggaggctcatcgttcctattcaggcagatgttatcgaggtccgacnnnnnnaaaaactcccaaccaaatcctactaaaaagatcggatacgcatgaggct

SEQ ID NO: 3040 - DNA, 146 bp, Artificial Sequence
  Bisulfite Padlock Probe
  misc_feature 96, 97, 98, 99, 100, 101: n = A,T,C or G
gactggaagagcactgttactaccgcaactacacttaaaacaaccccgttggaggctcatcgttcctattcaggcagatgttatcgaggtccgacnnnnnnacttcacgcaattacacaaaaacccgatcggatacgcatgaggct

SEQ ID NO: 3041 - DNA, 146 bp, Artificial Sequence
  Bisulfite Padlock Probe
  misc_feature 92, 93, 94, 95, 96, 97: n = A,T,C or G
gactggaagagcactgttactaccgcgaatcccccacttaaaagttggaggctcatcgttcctattcaggcagatgttatcgaggtccgacnnnnnnaaaaactcccaaccaaatcctactaaaaagatcggatacgcatgaggct

SEQ ID NO: 3042 - DNA, 146 bp, Artificial Sequence
  Bisulfite Padlock Probe
  misc_feature 96, 97, 98, 99, 100, 101: n = A,T,C or G
gactggaagagcactgttactaccgcgactacacttaaaacaaccccgttggaggctcatcgttcctattcaggcagatgttatcgaggtccgacnnnnnnacttcacgcaattacgcaaaaacccgatcggatacgcatgaggct

SEQ ID NO: 3043 - DNA, 146 bp, Artificial Sequence
  Bisulfite Padlock Probe
  misc_feature 95, 96, 97, 98, 99, 100: n = A,T,C or G
gactggaagagcactgttactacctaaataacaccctactacaaacgttggaggctcatcgttcctattcaggcagatgttatcgaggtccgacnnnnnnaacataaaccaaccttaaaacaaaacgatcggatacgcatgaggct

SEQ ID NO: 3044 - DNA, 146 bp, Artificial Sequence
  Bisulfite Padlock Probe
  misc_feature 95, 96, 97, 98, 99, 100: n = A,T,C or G
gactggaagagcactgttactacctaaataacgccctactacaaacgttggaggctcatcgttcctattcaggcagatgttatcgaggtccgacnnnnnnaacataaaccaaccttaaaacaaaacgatcggatacgcatgaggct

SEQ ID NO: 3045 - DNA, 146 bp, Artificial Sequence
  Bisulfite Padlock Probe
  misc_feature 96, 97, 98, 99, 100, 101: n = A,T,C or G
gactggaagagcactgttactacctacaaatcaataacaaaaccccagttggaggctcatcgttcctattcaggcagatgttatcgaggtccgacnnnnnncctcgaaacaccaaacctactccccgatcggatacgcatgaggct

SEQ ID NO: 3046 - DNA, 146 bp, Artificial Sequence
  Bisulfite Padlock Probe
  misc_feature 96, 97, 98, 99, 100, 101: n = A,T,C or G
gactggaagagcactgttactacctacaaatcaataacaaaaccccagttggaggctcatcgttcctattcaggcagatgttatcgaggtccgacnnnnnncctcgaaacaccgaacctactccccgatcggatacgcatgaggct

SEQ ID NO: 3047 - DNA, 146 bp, Artificial Sequence
  Bisulfite Padlock Probe
  misc_feature 92, 93, 94, 95, 96, 97: n = A,T,C or G
gactggaagagcactgttactacctaccctcctccctcaccacgttggaggctcatcgttcctattcaggcagatgttatcgaggtccgacnnnnnncaattccaaccaaacgacaacacctcaaagatcggatacgcatgaggct

SEQ ID NO: 3048 - DNA, 146 bp, Artificial Sequence
  Bisulfite Padlock Probe
  misc_feature 92, 93, 94, 95, 96, 97: n = A,T,C or G
gactggaagagcactgttactacctaccctcctccctcaccacgttggaggctcatcgttcctattcaggcagatgttatcgaggtccgacnnnnnncaattccaaccaaacgacgacacctcaaagatcggatacgcatgaggct

SEQ ID NO: 3049 - DNA, 146 bp, Artificial Sequence
  Bisulfite Padlock Probe
  misc_feature 96, 97, 98, 99, 100, 101: n = A,T,C or G
gactggaagagcactgttactacctattaaaatctaacacaatcttcgttggaggctcatcgttcctattcaggcagatgttatcgaggtccgacnnnnnnattacgctcgcgatcattaaccttagatcggatacgcatgaggct

SEQ ID NO: 3050 - DNA, 146 bp, Artificial Sequence
  Bisulfite Padlock Probe
  misc_feature 96, 97, 98, 99, 100, 101: n = A,T,C or G
gactggaagagcactgttactacctattaaaatctaacacaatcttcgttggaggctcatcgttcctattcaggcagatgttatcgaggtccgacnnnnnnattacgctcgcgatcgttaaccttagatcggatacgcatgaggct

SEQ ID NO: 3051 - DNA, 146 bp, Artificial Sequence
  Bisulfite Padlock Probe
  misc_feature 92, 93, 94, 95, 96, 97: n = A,T,C or G
gactggaagagcactgttactacctccacccctccaaccctacgttggaggctcatcgttcctattcaggcagatgttatcgaggtccgacnnnnnnaaaaacgaaaaacgctctaaaaacaaaaagatcggatacgcatgaggct

SEQ ID NO: 3052 - DNA, 146 bp, Artificial Sequence
  Bisulfite Padlock Probe
  misc_feature 92, 93, 94, 95, 96, 97: n = A,T,C or G
gactggaagagcactgttactacctccacccctccaaccctacgttggaggctcatcgttcctattcaggcagatgttatcgaggtccgacnnnnnnaaaaacgaaaaacgctctaaaaacgaaaagatcggatacgcatgaggct

SEQ ID NO: 3053 - DNA, 146 bp, Artificial Sequence
  Bisulfite Padlock Probe
  misc_feature 92, 93, 94, 95, 96, 97: n = A,T,C or G
gactggaagagcactgttactacctccttctcaactaaaccaagttggaggctcatcgttcctattcaggcagatgttatcgaggtccgacnnnnnnaaaaatctctcaacaaaaccttctccaaagatcggatacgcatgaggct

SEQ ID NO: 3054 - DNA, 146 bp, Artificial Sequence
  Bisulfite Padlock Probe
  misc_feature 92, 93, 94, 95, 96, 97: n = A,T,C or G
gactggaagagcactgttactacctccttctcgactaaaccaagttggaggctcatcgttcctattcaggcagatgttatcgaggtccgacnnnnnnaaaaatctctcaacaaaaccttctccgaagatcggatacgcatgaggct

SEQ ID NO: 3055 - DNA, 146 bp, Artificial Sequence
  Bisulfite Padlock Probe
  misc_feature 92, 93, 94, 95, 96, 97: n = A,T,C or G
gactggaagagcactgttactacgaaaacaacacctataactagttggaggctcatcgttcctattcaggcagatgttatcgaggtccgacnnnnnnactacctcaaacaataataaacctatttcgatcggatacgcatgaggct

SEQ ID NO: 3056 - DNA, 146 bp, Artificial Sequence
  Bisulfite Padlock Probe
  misc_feature 92, 93, 94, 95, 96, 97: n = A,T,C or G
gactggaagagcactgttactacgaaaacaacgcctataactagttggaggctcatcgttcctattcaggcagatgttatcgaggtccgacnnnnnnactacctcaaacgataataaacctatttcgatcggatacgcatgaggct

SEQ ID NO: 3057 - DNA, 146 bp, Artificial Sequence
  Bisulfite Padlock Probe
  misc_feature 96, 97, 98, 99, 100, 101: n = A,T,C or G
gactggaagagcactgttactacgattttaccgaatacgaaacacatgttggaggctcatcgttcctattcaggcagatgttatcgaggtccgacnnnnnnaaataaactaaaacaacttttacccgatcggatacgcatgaggct

SEQ ID NO: 3058 - DNA, 146 bp, Artificial Sequence
  Bisulfite Padlock Probe
  misc_feature 96, 97, 98, 99, 100, 101: n = A,T,C or G
gactggaagagcactgttactacgattttaccgaatacgaaacgcatgttggaggctcatcgttcctattcaggcagatgttatcgaggtccgacnnnnnnaaataaactaaaacgacttttacccgatcggatacgcatgaggct

SEQ ID NO: 3059 - DNA, 146 bp, Artificial Sequence
  Bisulfite Padlock Probe
  misc_feature 92, 93, 94, 95, 96, 97: n = A,T,C or G
gactggaagagcactgttactacgcaacgcaacccaactataagttggaggctcatcgttcctattcaggcagatgttatcgaggtccgacnnnnnnaatacgcgaccgactacgacaaaaaatacgatcggatacgcatgaggct

SEQ ID NO: 3060 - DNA, 146 bp, Artificial Sequence
  Bisulfite Padlock Probe
  misc_feature 92, 93, 94, 95, 96, 97: n = A,T,C or G
gactggaagagcactgttactacgcaacgcaacccgactataagttggaggctcatcgttcctattcaggcagatgttatcgaggtccgacnnnnnnaatacgcgaccgactacgacgaaaaatacgatcggatacgcatgaggct

SEQ ID NO: 3061 - DNA, 146 bp, Artificial Sequence
  Bisulfite Padlock Probe
  misc_feature 93, 94, 95, 96, 97, 98: n = A,T,C or G
gactggaagagcactgttactacgcacaccataactaaaaatacgttggaggctcatcgttcctattcaggcagatgttatcgaggtccgacnnnnnnatatatcatttttaacccaaactaaaaagatcggatacgcatgaggct

SEQ ID NO: 3062 - DNA, 146 bp, Artificial Sequence
  Bisulfite Padlock Probe
  misc_feature 92, 93, 94, 95, 96, 97: n = A,T,C or G
gactggaagagcactgttactacgccaaaatcctcaaataaccgttggaggctcatcgttcctattcaggcagatgttatcgaggtccgacnnnnnncttctccttcctaaatcccctcccactacgatcggatacgcatgaggct

SEQ ID NO: 3063 - DNA, 146 bp, Artificial Sequence
  Bisulfite Padlock Probe
  misc_feature 92, 93, 94, 95, 96, 97: n = A,T,C or G
gactggaagagcactgttactacgccgaaatcctcaaataaccgttggaggctcatcgttcctattcaggcagatgttatcgaggtccgacnnnnnncttctccttcctaaatcccctcccgctacgatcggatacgcatgaggct

SEQ ID NO: 3064 - DNA, 146 bp, Artificial Sequence
  Bisulfite Padlock Probe
  misc_feature 94, 95, 96, 97, 98, 99: n = A,T,C or G
gactggaagagcactgttactacgccgctaaaacctcaactaaacgttggaggctcatcgttcctattcaggcagatgttatcgaggtccgacnnnnnnaaaaccaaacaatcaacacctaacaacgatcggatacgcatgaggct

SEQ ID NO: 3065 - DNA, 146 bp, Artificial Sequence
  Bisulfite Padlock Probe
  misc_feature 94, 95, 96, 97, 98, 99: n = A,T,C or G
gactggaagagcactgttactacgccgctaaaacctcgactaaacgttggaggctcatcgttcctattcaggcagatgttatcgaggtccgacnnnnnnaaaaccaaacaatcaacgcctaacaacgatcggatacgcatgaggct

SEQ ID NO: 3066 - DNA, 146 bp, Artificial Sequence
  Bisulfite Padlock Probe
  misc_feature 93, 94, 95, 96, 97, 98: n = A,T,C or G
gactggaagagcactgttactacgcgcaccataactaaaaatacgttggaggctcatcgttcctattcaggcagatgttatcgaggtccgacnnnnnnatatatcgtttttaacccaaactaaaaagatcggatacgcatgaggct

SEQ ID NO: 3067 - DNA, 146 bp, Artificial Sequence
  Bisulfite Padlock Probe
  misc_feature 92, 93, 94, 95, 96, 97: n = A,T,C or G
gactggaagagcactgttactacgctcacctttacactcaaacgttggaggctcatcgttcctattcaggcagatgttatcgaggtccgacnnnnnnctatttcccacctctcactctccaaccacgatcggatacgcatgaggct

SEQ ID NO: 3068 - DNA, 146 bp, Artificial Sequence
  Bisulfite Padlock Probe
  misc_feature 92, 93, 94, 95, 96, 97: n = A,T,C or G
gactggaagagcactgttactacgctccccctctaacactaacgttggaggctcatcgttcctattcaggcagatgttatcgaggtccgacnnnnnncctaaaaccaccaatatccctctcatcccgatcggatacgcatgaggct

SEQ ID NO: 3069 - DNA, 146 bp, Artificial Sequence
  Bisulfite Padlock Probe
  misc_feature 92, 93, 94, 95, 96, 97: n = A,T,C or G
gactggaagagcactgttactacgctccccctctaacgctaacgttggaggctcatcgttcctattcaggcagatgttatcgaggtccgacnnnnnncctaaaaccgccaatatccctctcatcccgatcggatacgcatgaggct

SEQ ID NO: 3070 - DNA, 146 bp, Artificial Sequence
  Bisulfite Padlock Probe
  misc_feature 92, 93, 94, 95, 96, 97: n = A,T,C or G
gactggaagagcactgttactacgctcgcctttacactcaaacgttggaggctcatcgttcctattcaggcagatgttatcgaggtccgacnnnnnnctatttcccacctctcactctccaaccacgatcggatacgcatgaggct

SEQ ID NO: 3071 - DNA, 146 bp, Artificial Sequence
  Bisulfite Padlock Probe
  misc_feature 93, 94, 95, 96, 97, 98: n = A,T,C or G
gactggaagagcactgttactacgcttatatataaatatatcccgttggaggctcatcgttcctattcaggcagatgttatcgaggtccgacnnnnnnactataaccatctctttccgccctaaaagatcggatacgcatgaggct

SEQ ID NO: 3072 - DNA, 146 bp, Artificial Sequence
  Bisulfite Padlock Probe
  misc_feature 94, 95, 96, 97, 98, 99: n = A,T,C or G
gactggaagagcactgttactacgcttccaaataaaacctaaaacgttggaggctcatcgttcctattcaggcagatgttatcgaggtccgacnnnnnnaactaaaaacaaccgaccgacgatcccgatcggatacgcatgaggct

SEQ ID NO: 3073 - DNA, 146 bp, Artificial Sequence
  Bisulfite Padlock Probe
  misc_feature 94, 95, 96, 97, 98, 99: n = A,T,C or G
gactggaagagcactgttactactactcctcctctacctattctcgttggaggctcatcgttcctattcaggcagatgttatcgaggtccgacnnnnnnaccaacaccaaaataaatacctatcccgatcggatacgcatgaggct

SEQ ID NO: 3074 - DNA, 146 bp, Artificial Sequence
  Bisulfite Padlock Probe
  misc_feature 94, 95, 96, 97, 98, 99: n = A,T,C or G
gactggaagagcactgttactactactcctcctctacctattctcgttggaggctcatcgttcctattcaggcagatgttatcgaggtccgacnnnnnnaccaacgccaaaataaatacctatcccgatcggatacgcatgaggct

SEQ ID NO: 3075 - DNA, 146 bp, Artificial Sequence
  Bisulfite Padlock Probe
  misc_feature 92, 93, 94, 95, 96, 97: n = A,T,C or G
gactggaagagcactgttactactcgataaacctacaaataaagttggaggctcatcgttcctattcaggcagatgttatcgaggtccgacnnnnnnaaaaataaaatctaaccttcttaattaacgatcggatacgcatgaggct

SEQ ID NO: 3076 - DNA, 146 bp, Artificial Sequence
  Bisulfite Padlock Probe
  misc_feature 92, 93, 94, 95, 96, 97: n = A,T,C or G
gactggaagagcactgttactactcgataaacctacgaataaagttggaggctcatcgttcctattcaggcagatgttatcgaggtccgacnnnnnnaaaaataaaatctaaccttcttaattaacgatcggatacgcatgaggct

SEQ ID NO: 3077 - DNA, 146 bp, Artificial Sequence
  Bisulfite Padlock Probe
  misc_feature 93, 94, 95, 96, 97, 98: n = A,T,C or G
gactggaagagcactgttactactctaccacttacaactaacccgttggaggctcatcgttcctattcaggcagatgttatcgaggtccgacnnnnnnaaataccctaaaacccgccaacccaaaagatcggatacgcatgaggct

SEQ ID NO: 3078 - DNA, 146 bp, Artificial Sequence
  Bisulfite Padlock Probe
  misc_feature 93, 94, 95, 96, 97, 98: n = A,T,C or G
gactggaagagcactgttactactctaccacttacaactaacccgttggaggctcatcgttcctattcaggcagatgttatcgaggtccgacnnnnnnaaataccctaaaacccgccaacccgaaagatcggatacgcatgaggct

SEQ ID NO: 3079 - DNA, 146 bp, Artificial Sequence
  Bisulfite Padlock Probe
  misc_feature 96, 97, 98, 99, 100, 101: n = A,T,C or G
gactggaagagcactgttactacttttccatcacttttaccacaaccgttggaggctcatcgttcctattcaggcagatgttatcgaggtccgacnnnnnnctttccccgtccctcccactaaaaagatcggatacgcatgaggct

SEQ ID NO: 3080 - DNA, 146 bp, Artificial Sequence
  Bisulfite Padlock Probe
  misc_feature 96, 97, 98, 99, 100, 101: n = A,T,C or G
gactggaagagcactgttactacttttccatcgcttttaccacaaccgttggaggctcatcgttcctattcaggcagatgttatcgaggtccgacnnnnnnctttccccgtccctcccgctaaaaagatcggatacgcatgaggct

SEQ ID NO: 3081 - DNA, 146 bp, Artificial Sequence
  Bisulfite Padlock Probe
  misc_feature 94, 95, 96, 97, 98, 99: n = A,T,C or G
gactggaagagcactgttactataaaaattacctcgccaaaacccgttggaggctcatcgttcctattcaggcagatgttatcgaggtccgacnnnnnnactacaatcctctccaaaatccaaaaagatcggatacgcatgaggct

SEQ ID NO: 3082 - DNA, 146 bp, Artificial Sequence
  Bisulfite Padlock Probe
  misc_feature 94, 95, 96, 97, 98, 99: n = A,T,C or G
gactggaagagcactgttactataaaaattacctcgccgaaacccgttggaggctcatcgttcctattcaggcagatgttatcgaggtccgacnnnnnnactacgatcctctccaaaatccaaaaagatcggatacgcatgaggct

SEQ ID NO: 3083 - DNA, 146 bp, Artificial Sequence
  Bisulfite Padlock Probe
  misc_feature 92, 93, 94, 95, 96, 97: n = A,T,C or G
gactggaagagcactgttactataaaaccccgacacccaactcgttggaggctcatcgttcctattcaggcagatgttatcgaggtccgacnnnnnnacacccaaaacatcaaccaatcctcaaaagatcggatacgcatgaggct

SEQ ID NO: 3084 - DNA, 146 bp, Artificial Sequence
  Bisulfite Padlock Probe
  misc_feature 92, 93, 94, 95, 96, 97: n = A,T,C or G
gactggaagagcactgttactataaaaccccgacacccgactcgttggaggctcatcgttcctattcaggcagatgttatcgaggtccgacnnnnnnacgcccaaaacatcaaccaatcctcaaaagatcggatacgcatgaggct

SEQ ID NO: 3085 - DNA, 146 bp, Artificial Sequence
  Bisulfite Padlock Probe
  misc_feature 93, 94, 95, 96, 97, 98: n = A,T,C or G
gactggaagagcactgttactataaacacacacactcactaatagttggaggctcatcgttcctattcaggcagatgttatcgaggtccgacnnnnnnctctacacccaacctaccaaatccaaccgatcggatacgcatgaggct

SEQ ID NO: 3086 - DNA, 146 bp, Artificial Sequence
  Bisulfite Padlock Probe
  misc_feature 93, 94, 95, 96, 97, 98: n = A,T,C or G
gactggaagagcactgttactataaacacacgcactcactaatagttggaggctcatcgttcctattcaggcagatgttatcgaggtccgacnnnnnnctctacacccgacctaccaaatccaaccgatcggatacgcatgaggct

SEQ ID NO: 3087 - DNA, 146 bp, Artificial Sequence
  Bisulfite Padlock Probe
  misc_feature 94, 95, 96, 97, 98, 99: n = A,T,C or G
gactggaagagcactgttactataaacccacaacccctaaactccgttggaggctcatcgttcctattcaggcagatgttatcgaggtccgacnnnnnntaccctaaaactccaaataataacttcgatcggatacgcatgaggct

SEQ ID NO: 3088 - DNA, 146 bp, Artificial Sequence
  Bisulfite Padlock Probe
  misc_feature 94, 95, 96, 97, 98, 99: n = A,T,C or G
gactggaagagcactgttactataaacccgcaacccctaaactccgttggaggctcatcgttcctattcaggcagatgttatcgaggtccgacnnnnnntaccctaaaactccaaataataacttcgatcggatacgcatgaggct

SEQ ID NO: 3089 - DNA, 146 bp, Artificial Sequence
  Bisulfite Padlock Probe
  misc_feature 94, 95, 96, 97, 98, 99: n = A,T,C or G
gactggaagagcactgttactataaccccctcctctccaaaaaatgttggaggctcatcgttcctattcaggcagatgttatcgaggtccgacnnnnnnttttcctataaaccctaaaaaccctaagatcggatacgcatgaggct

SEQ ID NO: 3090 - DNA, 146 bp, Artificial Sequence
  Bisulfite Padlock Probe
  misc_feature 94, 95, 96, 97, 98, 99: n = A,T,C or G
gactggaagagcactgttactataaccccctcctctccgaaaaatgttggaggctcatcgttcctattcaggcagatgttatcgaggtccgacnnnnnnttttcctataaaccctaaaaaccctaagatcggatacgcatgaggct

SEQ ID NO: 3091 - DNA, 146 bp, Artificial Sequence
  Bisulfite Padlock Probe
  misc_feature 92, 93, 94, 95, 96, 97: n = A,T,C or G
gactggaagagcactgttactataccaacgcaaccgaaacatcgttggaggctcatcgttcctattcaggcagatgttatcgaggtccgacnnnnnnaaaaacgtaaaaactataccctcataaaagatcggatacgcatgaggct

SEQ ID NO: 3092 - DNA, 146 bp, Artificial Sequence
  Bisulfite Padlock Probe
  misc_feature 92, 93, 94, 95, 96, 97: n = A,T,C or G
gactggaagagcactgttactataccaacgcaaccgaaacgtcgttggaggctcatcgttcctattcaggcagatgttatcgaggtccgacnnnnnnaaaaacgtaaaaactataccctcgtaaaagatcggatacgcatgaggct

SEQ ID NO: 3093 - DNA, 146 bp, Artificial Sequence
  Bisulfite Padlock Probe
  misc_feature 95, 96, 97, 98, 99, 100: n = A,T,C or G
gactggaagagcactgttactatacgaaacccgaacctcaaaatacgttggaggctcatcgttcctattcaggcagatgttatcgaggtccgacnnnnnnctctactcttcgcaactccccaaaccgatcggatacgcatgaggct

SEQ ID NO: 3094 - DNA, 146 bp, Artificial Sequence
  Bisulfite Padlock Probe
  misc_feature 95, 96, 97, 98, 99, 100: n = A,T,C or G
gactggaagagcactgttactatacgaaacccgaacctcgaaatacgttggaggctcatcgttcctattcaggcagatgttatcgaggtccgacnnnnnnctctactcttcgcaactccccgaaccgatcggatacgcatgaggct

SEQ ID NO: 3095 - DNA, 146 bp, Artificial Sequence
  Bisulfite Padlock Probe
  misc_feature 96, 97, 98, 99, 100, 101: n = A,T,C or G
gactggaagagcactgttactatcctaaatcactatcttaaataatagttggaggctcatcgttcctattcaggcagatgttatcgaggtccgacnnnnnncgacgcaaacactcactctcaaaccgatcggatacgcatgaggct

SEQ ID NO: 3096 - DNA, 146 bp, Artificial Sequence
  Bisulfite Padlock Probe
  misc_feature 96, 97, 98, 99, 100, 101: n = A,T,C or G
gactggaagagcactgttactatcctaaatcactatcttaaataatagttggaggctcatcgttcctattcaggcagatgttatcgaggtccgacnnnnnncgacgcaaacactcgctctcaaaccgatcggatacgcatgaggct

SEQ ID NO: 3097 - DNA, 146 bp, Artificial Sequence
  Bisulfite Padlock Probe
  misc_feature 93, 94, 95, 96, 97, 98: n = A,T,C or G
gactggaagagcactgttactattaaacgctaaaacacaaccccgttggaggctcatcgttcctattcaggcagatgttatcgaggtccgacnnnnnnataaaataaaaacaacacaaactaaaccgatcggatacgcatgaggct

SEQ ID NO: 3098 - DNA, 146 bp, Artificial Sequence
  Bisulfite Padlock Probe
  misc_feature 93, 94, 95, 96, 97, 98: n = A,T,C or G
gactggaagagcactgttactattaaacgctaaaacgcaaccccgttggaggctcatcgttcctattcaggcagatgttatcgaggtccgacnnnnnnataaaataaaaacaacacgaactaaaccgatcggatacgcatgaggct

SEQ ID NO: 3099 - DNA, 146 bp, Artificial Sequence
  Bisulfite Padlock Probe
  misc_feature 92, 93, 94, 95, 96, 97: n = A,T,C or G
gactggaagagcactgttactattaacgataacgccacaaaacgttggaggctcatcgttcctattcaggcagatgttatcgaggtccgacnnnnnnaaaccaacgccaaactaccattaaccaacgatcggatacgcatgaggct

SEQ ID NO: 3100 - DNA, 146 bp, Artificial Sequence
  Bisulfite Padlock Probe
  misc_feature 92, 93, 94, 95, 96, 97: n = A,T,C or G
gactggaagagcactgttactattaacgataacgccgcaaaacgttggaggctcatcgttcctattcaggcagatgttatcgaggtccgacnnnnnnaaaccaacgccaaactaccgttaaccaacgatcggatacgcatgaggct

SEQ ID NO: 3101 - DNA, 146 bp, Artificial Sequence
  Bisulfite Padlock Probe
  misc_feature 94, 95, 96, 97, 98, 99: n = A,T,C or G
gactggaagagcactgttactatttaatatacataaaataaaaacgttggaggctcatcgttcctattcaggcagatgttatcgaggtccgacnnnnnnactcttcccctaaactttttaaaaatagatcggatacgcatgaggct

SEQ ID NO: 3102 - DNA, 146 bp, Artificial Sequence
  Bisulfite Padlock Probe
  misc_feature 94, 95, 96, 97, 98, 99: n = A,T,C or G
gactggaagagcactgttactcaaaataatatccacccttacttcgttggaggctcatcgttcctattcaggcagatgttatcgaggtccgacnnnnnnaatttccaaaacaaactctaaaactccgatcggatacgcatgaggct

SEQ ID NO: 3103 - DNA, 146 bp, Artificial Sequence
  Bisulfite Padlock Probe
  misc_feature 94, 95, 96, 97, 98, 99: n = A,T,C or G
gactggaagagcactgttactcaaaataatatccgcccttacttcgttggaggctcatcgttcctattcaggcagatgttatcgaggtccgacnnnnnnaatttccgaaacaaactctaaaactccgatcggatacgcatgaggct

SEQ ID NO: 3104 - DNA, 146 bp, Artificial Sequence
  Bisulfite Padlock Probe
  misc_feature 95, 96, 97, 98, 99, 100: n = A,T,C or G
gactggaagagcactgttactcaaaatctaaactatataaaaatacgttggaggctcatcgttcctattcaggcagatgttatcgaggtccgacnnnnnnaaactcaacctactcctctcccccacgatcggatacgcatgaggct

SEQ ID NO: 3105 - DNA, 146 bp, Artificial Sequence
  Bisulfite Padlock Probe
  misc_feature 92, 93, 94, 95, 96, 97: n = A,T,C or G
gactggaagagcactgttactcaaactcaattctcccccacccgttggaggctcatcgttcctattcaggcagatgttatcgaggtccgacnnnnnnatcccaaacacctactaaaaccaaaaacagatcggatacgcatgaggct

SEQ ID NO: 3106 - DNA, 146 bp, Artificial Sequence
  Bisulfite Padlock Probe
  misc_feature 93, 94, 95, 96, 97, 98: n = A,T,C or G
gactggaagagcactgttactcaacactccaaatctatacaaacgttggaggctcatcgttcctattcaggcagatgttatcgaggtccgacnnnnnnttaaaaactaaccatcccctacctccccgatcggatacgcatgaggct

SEQ ID NO: 3107 - DNA, 146 bp, Artificial Sequence
  Bisulfite Padlock Probe
  misc_feature 93, 94, 95, 96, 97, 98: n = A,T,C or G
gactggaagagcactgttactcaacactccgaatctatacaaacgttggaggctcatcgttcctattcaggcagatgttatcgaggtccgacnnnnnnttaaaaactaaccatcccctacctccccgatcggatacgcatgaggct

SEQ ID NO: 3108 - DNA, 146 bp, Artificial Sequence
  Bisulfite Padlock Probe
  misc_feature 92, 93, 94, 95, 96, 97: n = A,T,C or G
gactggaagagcactgttactcaatactaatacactcctaaaagttggaggctcatcgttcctattcaggcagatgttatcgaggtccgacnnnnnngtatccgcgctacaaccaaaactcactatgatcggatacgcatgaggct

SEQ ID NO: 3109 - DNA, 146 bp, Artificial Sequence
  Bisulfite Padlock Probe
  misc_feature 96, 97, 98, 99, 100, 101: n = A,T,C or G
gactggaagagcactgttactcacaaataaaattatctaacccctccgttggaggctcatcgttcctattcaggcagatgttatcgaggtccgacnnnnnncacttaccccgctacccaacaactcgatcggatacgcatgaggct

SEQ ID NO: 3110 - DNA, 146 bp, Artificial Sequence
  Bisulfite Padlock Probe
  misc_feature 93, 94, 95, 96, 97, 98: n = A,T,C or G
gactggaagagcactgttactcacacgaaaatctaaatacaatcgttggaggctcatcgttcctattcaggcagatgttatcgaggtccgacnnnnnnaaaacctaaaacgaacgaaacaaacccagatcggatacgcatgaggct

SEQ ID NO: 3111 - DNA, 146 bp, Artificial Sequence
  Bisulfite Padlock Probe
  misc_feature 93, 94, 95, 96, 97, 98: n = A,T,C or G
gactggaagagcactgttactcacacgaaaatctaaatacgatcgttggaggctcatcgttcctattcaggcagatgttatcgaggtccgacnnnnnnaaaacctaaaacgaacgaaacgaacccagatcggatacgcatgaggct

SEQ ID NO: 3112 - DNA, 146 bp, Artificial Sequence
  Bisulfite Padlock Probe
  misc_feature 95, 96, 97, 98, 99, 100: n = A,T,C or G
gactggaagagcactgttactcacatataaaaactacaaaataaacgttggaggctcatcgttcctattcaggcagatgttatcgaggtccgacnnnnnnaaaaccccaaactaccgatctccaccgatcggatacgcatgaggct

SEQ ID NO: 3113 - DNA, 146 bp, Artificial Sequence
  Bisulfite Padlock Probe
  misc_feature 92, 93, 94, 95, 96, 97: n = A,T,C or G
gactggaagagcactgttactcaccactaaatacttaccaaaagttggaggctcatcgttcctattcaggcagatgttatcgaggtccgacnnnnnncctaacttacttttaactacaaacaaacagatcggatacgcatgaggct

SEQ ID NO: 3114 - DNA, 146 bp, Artificial Sequence
  Bisulfite Padlock Probe
  misc_feature 92, 93, 94, 95, 96, 97: n = A,T,C or G
gactggaagagcactgttactcaccgctaaatacttaccaaaagttggaggctcatcgttcctattcaggcagatgttatcgaggtccgacnnnnnncctaacttacttttaactacaaacaaacagatcggatacgcatgaggct

SEQ ID NO: 3115 - DNA, 146 bp, Artificial Sequence
  Bisulfite Padlock Probe
  misc_feature 94, 95, 96, 97, 98, 99: n = A,T,C or G
gactggaagagcactgttactcaccttccctaacaccaacaaaacgttggaggctcatcgttcctattcaggcagatgttatcgaggtccgacnnnnnnaccgaaaactacacactactactaaccgatcggatacgcatgaggct

SEQ ID NO: 3116 - DNA, 146 bp, Artificial Sequence
  Bisulfite Padlock Probe
  misc_feature 94, 95, 96, 97, 98, 99: n = A,T,C or G
gactggaagagcactgttactcaccttccctaacaccgacaaaacgttggaggctcatcgttcctattcaggcagatgttatcgaggtccgacnnnnnnaccgaaaactacacgctactactaaccgatcggatacgcatgaggct

SEQ ID NO: 3117 - DNA, 146 bp, Artificial Sequence
  Bisulfite Padlock Probe
  misc_feature 96, 97, 98, 99, 100, 101: n = A,T,C or G
gactggaagagcactgttactcacgaataaaattatctaacccctccgttggaggctcatcgttcctattcaggcagatgttatcgaggtccgacnnnnnncacttaccccgctacccgacaactcgatcggatacgcatgaggct

SEQ ID NO: 3118 - DNA, 146 bp, Artificial Sequence
  Bisulfite Padlock Probe
  misc_feature 95, 96, 97, 98, 99, 100: n = A,T,C or G
gactggaagagcactgttactcacgtataaaaactacaaaataaacgttggaggctcatcgttcctattcaggcagatgttatcgaggtccgacnnnnnnaaaaccccaaactaccgatctccgccgatcggatacgcatgaggct

SEQ ID NO: 3119 - DNA, 146 bp, Artificial Sequence
  Bisulfite Padlock Probe
  misc_feature 94, 95, 96, 97, 98, 99: n = A,T,C or G
gactggaagagcactgttactcactttctcacctacacctatcacgttggaggctcatcgttcctattcaggcagatgttatcgaggtccgacnnnnnnaaacgaaacgaaacaaaactaaaacccgatcggatacgcatgaggct

SEQ ID NO: 3120 - DNA, 146 bp, Artificial Sequence
  Bisulfite Padlock Probe
  misc_feature 94, 95, 96, 97, 98, 99: n = A,T,C or G
gactggaagagcactgttactcactttctcacctacgcctatcacgttggaggctcatcgttcctattcaggcagatgttatcgaggtccgacnnnnnnaaacgaaacgaaacgaaactaaaacccgatcggatacgcatgaggct

SEQ ID NO: 3121 - DNA, 146 bp, Artificial Sequence
  Bisulfite Padlock Probe
  misc_feature 92, 93, 94, 95, 96, 97: n = A,T,C or G
gactggaagagcactgttactcataatatttctacaaaaacccgttggaggctcatcgttcctattcaggcagatgttatcgaggtccgacnnnnnnataccccaactacgaaaacacaacaaatagatcggatacgcatgaggct

SEQ ID NO: 3122 - DNA, 146 bp, Artificial Sequence
  Bisulfite Padlock Probe
  misc_feature 92, 93, 94, 95, 96, 97: n = A,T,C or G
gactggaagagcactgttactcataatatttctacaaaaacccgttggaggctcatcgttcctattcaggcagatgttatcgaggtccgacnnnnnnataccccaactacgaaaacgcaacaaatagatcggatacgcatgaggct

SEQ ID NO: 3123 - DNA, 146 bp, Artificial Sequence
  Bisulfite Padlock Probe
  misc_feature 92, 93, 94, 95, 96, 97: n = A,T,C or G
gactggaagagcactgttactcatccaaccaaaaactcatatcgttggaggctcatcgttcctattcaggcagatgttatcgaggtccgacnnnnnncaacaaaattctctctcatttctaaacccgatcggatacgcatgaggct

SEQ ID NO: 3124 - DNA, 146 bp, Artificial Sequence
  Bisulfite Padlock Probe
  misc_feature 92, 93, 94, 95, 96, 97: n = A,T,C or G
gactggaagagcactgttactcatccaaccgaaaactcatatcgttggaggctcatcgttcctattcaggcagatgttatcgaggtccgacnnnnnncaacaaaattctctctcatttctaaacccgatcggatacgcatgaggct

SEQ ID NO: 3125 - DNA, 146 bp, Artificial Sequence
  Bisulfite Padlock Probe
  misc_feature 92, 93, 94, 95, 96, 97: n = A,T,C or G
gactggaagagcactgttactcatcccttctccctcctatcacgttggaggctcatcgttcctattcaggcagatgttatcgaggtccgacnnnnnnccccttatacccaaaacaaacaacaaatcgatcggatacgcatgaggct

SEQ ID NO: 3126 - DNA, 146 bp, Artificial Sequence
  Bisulfite Padlock Probe
  misc_feature 92, 93, 94, 95, 96, 97: n = A,T,C or G
gactggaagagcactgttactcattaatcaaacctaaactcatgttggaggctcatcgttcctattcaggcagatgttatcgaggtccgacnnnnnnaataaacaaaaataaactacattaactatgatcggatacgcatgaggct

SEQ ID NO: 3127 - DNA, 146 bp, Artificial Sequence
  Bisulfite Padlock Probe
  misc_feature 92, 93, 94, 95, 96, 97: n = A,T,C or G
gactggaagagcactgttactcattaatcaaacctaaactcatgttggaggctcatcgttcctattcaggcagatgttatcgaggtccgacnnnnnnaataaacaaaaataaactacgttaactatgatcggatacgcatgaggct

SEQ ID NO: 3128 - DNA, 146 bp, Artificial Sequence
  Bisulfite Padlock Probe
  misc_feature 96, 97, 98, 99, 100, 101: n = A,T,C or G
gactggaagagcactgttactccaaaattaaaaccctccactaaaaagttggaggctcatcgttcctattcaggcagatgttatcgaggtccgacnnnnnnaccactaataaataaaaacaaacccgatcggatacgcatgaggct

SEQ ID NO: 3129 - DNA, 146 bp, Artificial Sequence
  Bisulfite Padlock Probe
  misc_feature 96, 97, 98, 99, 100, 101: n = A,T,C or G
gactggaagagcactgttactccaaaattaaaaccctccgctaaaaagttggaggctcatcgttcctattcaggcagatgttatcgaggtccgacnnnnnnaccactaataaataaaaacgaacccgatcggatacgcatgaggct

SEQ ID NO: 3130 - DNA, 146 bp, Artificial Sequence
  Bisulfite Padlock Probe
  misc_feature 92, 93, 94, 95, 96, 97: n = A,T,C or G
gactggaagagcactgttactccaaacaactttactaatacccgttggaggctcatcgttcctattcaggcagatgttatcgaggtccgacnnnnnnaaaataaaaactcaaactctaccccaatcgatcggatacgcatgaggct

SEQ ID NO: 3131 - DNA, 146 bp, Artificial Sequence
  Bisulfite Padlock Probe
  misc_feature 92, 93, 94, 95, 96, 97: n = A,T,C or G
gactggaagagcactgttactccaaacgactttactaatacccgttggaggctcatcgttcctattcaggcagatgttatcgaggtccgacnnnnnnaaaataaaaactcaaactctaccccaatcgatcggatacgcatgaggct

SEQ ID NO: 3132 - DNA, 146 bp, Artificial Sequence
  Bisulfite Padlock Probe
  misc_feature 94, 95, 96, 97, 98, 99: n = A,T,C or G
gactggaagagcactgttactccaaccctataaaattcccccatagttggaggctcatcgttcctattcaggcagatgttatcgaggtccgacnnnnnnaatacacactcctccgactacccactagatcggatacgcatgaggct

SEQ ID NO: 3133 - DNA, 146 bp, Artificial Sequence
  Bisulfite Padlock Probe
  misc_feature 94, 95, 96, 97, 98, 99: n = A,T,C or G
gactggaagagcactgttactccaaccctataaaattcccccatagttggaggctcatcgttcctattcaggcagatgttatcgaggtccgacnnnnnnaatacacactcctccgactacccgctagatcggatacgcatgaggct

SEQ ID NO: 3134 - DNA, 146 bp, Artificial Sequence
  Bisulfite Padlock Probe
  misc_feature 96, 97, 98, 99, 100, 101: n = A,T,C or G
gactggaagagcactgttactccaatcctacctaatccacaaactacgttggaggctcatcgttcctattcaggcagatgttatcgaggtccgacnnnnnnaaaaactaaccactcccaccctctcgatcggatacgcatgaggct

SEQ ID NO: 3135 - DNA, 146 bp, Artificial Sequence
  Bisulfite Padlock Probe
  misc_feature 96, 97, 98, 99, 100, 101: n = A,T,C or G
gactggaagagcactgttactccaatcctacctaatccacaaactacgttggaggctcatcgttcctattcaggcagatgttatcgaggtccgacnnnnnnaaaaactaaccgctcccaccctctcgatcggatacgcatgaggct

SEQ ID NO: 3136 - DNA, 146 bp, Artificial Sequence
  Bisulfite Padlock Probe
  misc_feature 92, 93, 94, 95, 96, 97: n = A,T,C or G
gactggaagagcactgttactccacaataaccaacaccaccaagttggaggctcatcgttcctattcaggcagatgttatcgaggtccgacnnnnnnaacccaacacgaacgtataaaaacaactcgatcggatacgcatgaggct

SEQ ID NO: 3137 - DNA, 146 bp, Artificial Sequence
  Bisulfite Padlock Probe
  misc_feature 92, 93, 94, 95, 96, 97: n = A,T,C or G
gactggaagagcactgttactccacactatttcctaacttcacgttggaggctcatcgttcctattcaggcagatgttatcgaggtccgacnnnnnncaccatccgaccaatttcaacataaataagatcggatacgcatgaggct

SEQ ID NO: 3138 - DNA, 146 bp, Artificial Sequence
  Bisulfite Padlock Probe
  misc_feature 92, 93, 94, 95, 96, 97: n = A,T,C or G
gactggaagagcactgttactccacactatttcctaacttcgcgttggaggctcatcgttcctattcaggcagatgttatcgaggtccgacnnnnnncaccatccgaccaatttcaacgtaaataagatcggatacgcatgaggct

SEQ ID NO: 3139 - DNA, 146 bp, Artificial Sequence
  Bisulfite Padlock Probe
  misc_feature 92, 93, 94, 95, 96, 97: n = A,T,C or G
gactggaagagcactgttactccacccaaaatcctcaactaaagttggaggctcatcgttcctattcaggcagatgttatcgaggtccgacnnnnnnaaaaatacctcaaaaccaacctcaaaaaagatcggatacgcatgaggct

SEQ ID NO: 3140 - DNA, 146 bp, Artificial Sequence
  Bisulfite Padlock Probe
  misc_feature 92, 93, 94, 95, 96, 97: n = A,T,C or G
gactggaagagcactgttactccacccgaaatcctcaactaaagttggaggctcatcgttcctattcaggcagatgttatcgaggtccgacnnnnnnaaaaatacctcaaaaccaacctcgaaaaagatcggatacgcatgaggct

SEQ ID NO: 3141 - DNA, 146 bp, Artificial Sequence
  Bisulfite Padlock Probe
  misc_feature 92, 93, 94, 95, 96, 97: n = A,T,C or G
gactggaagagcactgttactccactcacataaatataacatcgttggaggctcatcgttcctattcaggcagatgttatcgaggtccgacnnnnnnactcctactcaaaaatccacttcctactcgatcggatacgcatgaggct

SEQ ID NO: 3142 - DNA, 146 bp, Artificial Sequence
  Bisulfite Padlock Probe
  misc_feature 92, 93, 94, 95, 96, 97: n = A,T,C or G
gactggaagagcactgttactccactcgcataaatataacatcgttggaggctcatcgttcctattcaggcagatgttatcgaggtccgacnnnnnnactcctactcaaaaatccacttcctactcgatcggatacgcatgaggct

SEQ ID NO: 3143 - DNA, 146 bp, Artificial Sequence
  Bisulfite Padlock Probe
  misc_feature 92, 93, 94, 95, 96, 97: n = A,T,C or G
gactggaagagcactgttactcccaaaatctacttaacaaatagttggaggctcatcgttcctattcaggcagatgttatcgaggtccgacnnnnnncaccctctcttctcacatcttcttaacttgatcggatacgcatgaggct

SEQ ID NO: 3144 - DNA, 146 bp, Artificial Sequence
  Bisulfite Padlock Probe
  misc_feature 92, 93, 94, 95, 96, 97: n = A,T,C or G
gactggaagagcactgttactccccactcacccctaaaaacccgttggaggctcatcgttcctattcaggcagatgttatcgaggtccgacnnnnnncaaaaataaccacccccaaacctataacagatcggatacgcatgaggct

SEQ ID NO: 3145 - DNA, 146 bp, Artificial Sequence
  Bisulfite Padlock Probe
  misc_feature 92, 93, 94, 95, 96, 97: n = A,T,C or G
gactggaagagcactgttactccccgataacctccttcaaaacgttggaggctcatcgttcctattcaggcagatgttatcgaggtccgacnnnnnnccaccccactaccatacccctaaaactaagatcggatacgcatgaggct

SEQ ID NO: 3146 - DNA, 146 bp, Artificial Sequence
  Bisulfite Padlock Probe
  misc_feature 92, 93, 94, 95, 96, 97: n = A,T,C or G
gactggaagagcactgttactccccgataacctccttcgaaacgttggaggctcatcgttcctattcaggcagatgttatcgaggtccgacnnnnnnccaccccactaccgtacccctaaaactaagatcggatacgcatgaggct

SEQ ID NO: 3147 - DNA, 146 bp, Artificial Sequence
  Bisulfite Padlock Probe
  misc_feature 92, 93, 94, 95, 96, 97: n = A,T,C or G
gactggaagagcactgttactcccgaaatctacttaacaaatagttggaggctcatcgttcctattcaggcagatgttatcgaggtccgacnnnnnncaccctctcttctcacatcttcttaacttgatcggatacgcatgaggct

SEQ ID NO: 3148 - DNA, 146 bp, Artificial Sequence
  Bisulfite Padlock Probe
  misc_feature 94, 95, 96, 97, 98, 99: n = A,T,C or G
gactggaagagcactgttactccctccgacgaaaacgactcataagttggaggctcatcgttcctattcaggcagatgttatcgaggtccgacnnnnnnaacgacactcaatccaaaccccaaaccgatcggatacgcatgaggct

SEQ ID NO: 3149 - DNA, 146 bp, Artificial Sequence
  Bisulfite Padlock Probe
  misc_feature 94, 95, 96, 97, 98, 99: n = A,T,C or G
gactggaagagcactgttactccctccgacgaaaacgactcgtaagttggaggctcatcgttcctattcaggcagatgttatcgaggtccgacnnnnnnaacgacactcgatccaaaccccaaaccgatcggatacgcatgaggct

SEQ ID NO: 3150 - DNA, 146 bp, Artificial Sequence
  Bisulfite Padlock Probe
  misc_feature 92, 93, 94, 95, 96, 97: n = A,T,C or G
gactggaagagcactgttactccctcttcccaaaccaaaaaccgttggaggctcatcgttcctattcaggcagatgttatcgaggtccgacnnnnnntctccctccccaacactccaaaaactaaagatcggatacgcatgaggct

SEQ ID NO: 3151 - DNA, 146 bp, Artificial Sequence
  Bisulfite Padlock Probe
  misc_feature 92, 93, 94, 95, 96, 97: n = A,T,C or G
gactggaagagcactgttactccctcttcccaaaccgaaaaccgttggaggctcatcgttcctattcaggcagatgttatcgaggtccgacnnnnnntctccctccccaacactccaaaaactaaagatcggatacgcatgaggct

SEQ ID NO: 3152 - DNA, 146 bp, Artificial Sequence
  Bisulfite Padlock Probe
  misc_feature 94, 95, 96, 97, 98, 99: n = A,T,C or G
gactggaagagcactgttactccgaaacaaattttcctcccaaccgttggaggctcatcgttcctattcaggcagatgttatcgaggtccgacnnnnnnacaacacccacataaaatatataccacgatcggatacgcatgaggct

SEQ ID NO: 3153 - DNA, 146 bp, Artificial Sequence
  Bisulfite Padlock Probe
  misc_feature 94, 95, 96, 97, 98, 99: n = A,T,C or G
gactggaagagcactgttactccgaaacgaattttcctcccaaccgttggaggctcatcgttcctattcaggcagatgttatcgaggtccgacnnnnnnacaacacccacgtaaaatatataccacgatcggatacgcatgaggct

SEQ ID NO: 3154 - DNA, 146 bp, Artificial Sequence
  Bisulfite Padlock Probe
  misc_feature 92, 93, 94, 95, 96, 97: n = A,T,C or G
gactggaagagcactgttactccgcaaccaccatctatactctgttggaggctcatcgttcctattcaggcagatgttatcgaggtccgacnnnnnnctatccccacgcatctcctaaacctaaacgatcggatacgcatgaggct

SEQ ID NO: 3155 - DNA, 146 bp, Artificial Sequence
  Bisulfite Padlock Probe
  misc_feature 92, 93, 94, 95, 96, 97: n = A,T,C or G
gactggaagagcactgttactccgcaaccgccatctatactctgttggaggctcatcgttcctattcaggcagatgttatcgaggtccgacnnnnnnctatccccacgcgtctcctaaacctaaacgatcggatacgcatgaggct

SEQ ID NO: 3156 - DNA, 146 bp, Artificial Sequence
  Bisulfite Padlock Probe
  misc_feature 92, 93, 94, 95, 96, 97: n = A,T,C or G
gactggaagagcactgttactccgcaataaccaacaccaccaagttggaggctcatcgttcctattcaggcagatgttatcgaggtccgacnnnnnnaacccaacacgaacgtataaaaacgactcgatcggatacgcatgaggct

SEQ ID NO: 3157 - DNA, 146 bp, Artificial Sequence
  Bisulfite Padlock Probe
  misc_feature 94, 95, 96, 97, 98, 99: n = A,T,C or G
gactggaagagcactgttactcctaaccacgaaccgaacaaaaaagttggaggctcatcgttcctattcaggcagatgttatcgaggtccgacnnnnnnccctaaaccaccacaaatcaacaaaacgatcggatacgcatgaggct

SEQ ID NO: 3158 - DNA, 146 bp, Artificial Sequence
  Bisulfite Padlock Probe
  misc_feature 94, 95, 96, 97, 98, 99: n = A,T,C or G
gactggaagagcactgttactcctaaccacgaaccgaacgaaaaagttggaggctcatcgttcctattcaggcagatgttatcgaggtccgacnnnnnnccctaaaccaccacaaatcaacaaaacgatcggatacgcatgaggct

SEQ ID NO: 3159 - DNA, 146 bp, Artificial Sequence
  Bisulfite Padlock Probe
  misc_feature 96, 97, 98, 99, 100, 101: n = A,T,C or G
gactggaagagcactgttactcctcgatccccactaaaaataataacgttggaggctcatcgttcctattcaggcagatgttatcgaggtccgacnnnnnnctcccgactaccgtcaccctaaatcgatcggatacgcatgaggct

SEQ ID NO: 3160 - DNA, 146 bp, Artificial Sequence
  Bisulfite Padlock Probe
  misc_feature 96, 97, 98, 99, 100, 101: n = A,T,C or G
gactggaagagcactgttactcctcgatccccgctaaaaataataacgttggaggctcatcgttcctattcaggcagatgttatcgaggtccgacnnnnnnctcccgactaccgtcgccctaaatcgatcggatacgcatgaggct

SEQ ID NO: 3161 - DNA, 146 bp, Artificial Sequence
  Bisulfite Padlock Probe
  misc_feature 96, 97, 98, 99, 100, 101: n = A,T,C or G
gactggaagagcactgttactcctctaccctcattaaaataaacaacgttggaggctcatcgttcctattcaggcagatgttatcgaggtccgacnnnnnnttcctctttccaaccccataaatccgatcggatacgcatgaggct

SEQ ID NO: 3162 - DNA, 146 bp, Artificial Sequence
  Bisulfite Padlock Probe
  misc_feature 96, 97, 98, 99, 100, 101: n = A,T,C or G
gactggaagagcactgttactcctctaccctcgttaaaataaacaacgttggaggctcatcgttcctattcaggcagatgttatcgaggtccgacnnnnnnttcctctttccaaccccgtaaatccgatcggatacgcatgaggct

SEQ ID NO: 3163 - DNA, 146 bp, Artificial Sequence
  Bisulfite Padlock Probe
  misc_feature 93, 94, 95, 96, 97, 98: n = A,T,C or G
gactggaagagcactgttactcgaaaaccttcccaaaataaaaagttggaggctcatcgttcctattcaggcagatgttatcgaggtccgacnnnnnnaactctaactctaaccctaactaaaaacgatcggatacgcatgaggct

SEQ ID NO: 3164 - DNA, 146 bp, Artificial Sequence
  Bisulfite Padlock Probe
  misc_feature 93, 94, 95, 96, 97, 98: n = A,T,C or G
gactggaagagcactgttactcgaaaaccttcccgaaataaaaagttggaggctcatcgttcctattcaggcagatgttatcgaggtccgacnnnnnnaactctaactctaaccctaactaaaaacgatcggatacgcatgaggct

SEQ ID NO: 3165 - DNA, 146 bp, Artificial Sequence
  Bisulfite Padlock Probe
  misc_feature 92, 93, 94, 95, 96, 97: n = A,T,C or G
gactggaagagcactgttactcgaaacgacacctaaaacaaaagttggaggctcatcgttcctattcaggcagatgttatcgaggtccgacnnnnnncaaaacctccgacctaaaaccccaaaaaagatcggatacgcatgaggct

SEQ ID NO: 3166 - DNA, 146 bp, Artificial Sequence
  Bisulfite Padlock Probe
  misc_feature 92, 93, 94, 95, 96, 97: n = A,T,C or G
gactggaagagcactgttactcgaaacgacgcctaaaacaaaagttggaggctcatcgttcctattcaggcagatgttatcgaggtccgacnnnnnncaaaacctccgacctaaaaccccgaaaaagatcggatacgcatgaggct

SEQ ID NO: 3167 - DNA, 146 bp, Artificial Sequence
  Bisulfite Padlock Probe
  misc_feature 95, 96, 97, 98, 99, 100: n = A,T,C or G
gactggaagagcactgttactcgaaatctaaactatataaaaatacgttggaggctcatcgttcctattcaggcagatgttatcgaggtccgacnnnnnnaaactcgacctactcctctcccccacgatcggatacgcatgaggct

SEQ ID NO: 3168 - DNA, 146 bp, Artificial Sequence
  Bisulfite Padlock Probe
  misc_feature 92, 93, 94, 95, 96, 97: n = A,T,C or G
gactggaagagcactgttactcgaactcaattctcccccacccgttggaggctcatcgttcctattcaggcagatgttatcgaggtccgacnnnnnnatcccaaacacctactaaaaccaaaaacggatcggatacgcatgaggct

SEQ ID NO: 3169 - DNA, 146 bp, Artificial Sequence
  Bisulfite Padlock Probe
  misc_feature 93, 94, 95, 96, 97, 98: n = A,T,C or G
gactggaagagcactgttactcgaactccgaaaacaccaaaaacgttggaggctcatcgttcctattcaggcagatgttatcgaggtccgacnnnnnntaacccctatccgcaaactatacactatgatcggatacgcatgaggct

SEQ ID NO: 3170 - DNA, 146 bp, Artificial Sequence
  Bisulfite Padlock Probe
  misc_feature 93, 94, 95, 96, 97, 98: n = A,T,C or G
gactggaagagcactgttactcgaactccgaaaacgccaaaaacgttggaggctcatcgttcctattcaggcagatgttatcgaggtccgacnnnnnntaacccctatccgcaaactatacgctatgatcggatacgcatgaggct

SEQ ID NO: 3171 - DNA, 146 bp, Artificial Sequence
  Bisulfite Padlock Probe
  misc_feature 93, 94, 95, 96, 97, 98: n = A,T,C or G
gactggaagagcactgttactcgaatcccatcaacaacacctctgttggaggctcatcgttcctattcaggcagatgttatcgaggtccgacnnnnnncaaaatacgctccgaaaatacaacccccgatcggatacgcatgaggct

SEQ ID NO: 3172 - DNA, 146 bp, Artificial Sequence
  Bisulfite Padlock Probe
  misc_feature 93, 94, 95, 96, 97, 98: n = A,T,C or G
gactggaagagcactgttactcgaatcccatcaacaacgcctctgttggaggctcatcgttcctattcaggcagatgttatcgaggtccgacnnnnnncaaaatacgctccgaaaatacgacccccgatcggatacgcatgaggct

SEQ ID NO: 3173 - DNA, 146 bp, Artificial Sequence
  Bisulfite Padlock Probe
  misc_feature 92, 93, 94, 95, 96, 97: n = A,T,C or G
gactggaagagcactgttactcgatactaatacactcctaaaagttggaggctcatcgttcctattcaggcagatgttatcgaggtccgacnnnnnngtatccgcgctacaaccgaaactcactatgatcggatacgcatgaggct

SEQ ID NO: 3174 - DNA, 146 bp, Artificial Sequence
  Bisulfite Padlock Probe
  misc_feature 95, 96, 97, 98, 99, 100: n = A,T,C or G
gactggaagagcactgttactcgctattaatatcgtcaaaacccacgttggaggctcatcgttcctattcaggcagatgttatcgaggtccgacnnnnnnaaatcctaaaaatcctaaacaaccccgatcggatacgcatgaggct

SEQ ID NO: 3175 - DNA, 146 bp, Artificial Sequence
  Bisulfite Padlock Probe
  misc_feature 95, 96, 97, 98, 99, 100: n = A,T,C or G
gactggaagagcactgttactcgctattaatatcgtcgaaacccacgttggaggctcatcgttcctattcaggcagatgttatcgaggtccgacnnnnnnaaatcctaaaaatcctaaacgaccccgatcggatacgcatgaggct

SEQ ID NO: 3176 - DNA, 146 bp, Artificial Sequence
  Bisulfite Padlock Probe
  misc_feature 93, 94, 95, 96, 97, 98: n = A,T,C or G
gactggaagagcactgttactctaaatactactaaaacaaaaccgttggaggctcatcgttcctattcaggcagatgttatcgaggtccgacnnnnnncaataaacaaaaacacaccaaaaatctcgatcggatacgcatgaggct

SEQ ID NO: 3177 - DNA, 146 bp, Artificial Sequence
  Bisulfite Padlock Probe
  misc_feature 93, 94, 95, 96, 97, 98: n = A,T,C or G
gactggaagagcactgttactctaaatactactaaaacaaaaccgttggaggctcatcgttcctattcaggcagatgttatcgaggtccgacnnnnnncaataaacgaaaacacaccaaaaatctcgatcggatacgcatgaggct

SEQ ID NO: 3178 - DNA, 146 bp, Artificial Sequence
  Bisulfite Padlock Probe
  misc_feature 96, 97, 98, 99, 100, 101: n = A,T,C or G
gactggaagagcactgttactctaaccgaataccgaactcacaaaccgttggaggctcatcgttcctattcaggcagatgttatcgaggtccgacnnnnnnatccctacgcttcctaaccccaaacgatcggatacgcatgaggct

SEQ ID NO: 3179 - DNA, 146 bp, Artificial Sequence
  Bisulfite Padlock Probe
  misc_feature 96, 97, 98, 99, 100, 101: n = A,T,C or G
gactggaagagcactgttactctaaccgaataccgaactcgcaaaccgttggaggctcatcgttcctattcaggcagatgttatcgaggtccgacnnnnnnatccctacgcttcctaaccccgaacgatcggatacgcatgaggct

SEQ ID NO: 3180 - DNA, 146 bp, Artificial Sequence
  Bisulfite Padlock Probe
  misc_feature 92, 93, 94, 95, 96, 97: n = A,T,C or G
gactggaagagcactgttactctaccccaccgaaaaacaaaccgttggaggctcatcgttcctattcaggcagatgttatcgaggtccgacnnnnnnaaaatactaacactcacccaaacaactacgatcggatacgcatgaggct

SEQ ID NO: 3181 - DNA, 146 bp, Artificial Sequence
  Bisulfite Padlock Probe
  misc_feature 92, 93, 94, 95, 96, 97: n = A,T,C or G
gactggaagagcactgttactctaccccaccgaaaaacgaaccgttggaggctcatcgttcctattcaggcagatgttatcgaggtccgacnnnnnnaaaatactaacgctcacccaaacaactacgatcggatacgcatgaggct

SEQ ID NO: 3182 - DNA, 146 bp, Artificial Sequence
  Bisulfite Padlock Probe
  misc_feature 93, 94, 95, 96, 97, 98: n = A,T,C or G
gactggaagagcactgttactctacttaaaaacccccaacttacgttggaggctcatcgttcctattcaggcagatgttatcgaggtccgacnnnnnntctacttaataactcccaatcctaaaaagatcggatacgcatgaggct

SEQ ID NO: 3183 - DNA, 146 bp, Artificial Sequence
  Bisulfite Padlock Probe
  misc_feature 93, 94, 95, 96, 97, 98: n = A,T,C or G
gactggaagagcactgttactctatcgctcaaaacaacaaacccgttggaggctcatcgttcctattcaggcagatgttatcgaggtccgacnnnnnnattaaatccacactcctcaacctctcccgatcggatacgcatgaggct

SEQ ID NO: 3184 - DNA, 146 bp, Artificial Sequence
  Bisulfite Padlock Probe
  misc_feature 93, 94, 95, 96, 97, 98: n = A,T,C or G
gactggaagagcactgttactctatcgctcaaaacgacaaacccgttggaggctcatcgttcctattcaggcagatgttatcgaggtccgacnnnnnnattaaatccgcactcctcaacctctcccgatcggatacgcatgaggct

SEQ ID NO: 3185 - DNA, 146 bp, Artificial Sequence
  Bisulfite Padlock Probe
  misc_feature 92, 93, 94, 95, 96, 97: n = A,T,C or G
gactggaagagcactgttactcttaaaccaaaaaactaatatagttggaggctcatcgttcctattcaggcagatgttatcgaggtccgacnnnnnnaataaaaacctacccttcctccaacaatcgatcggatacgcatgaggct

SEQ ID NO: 3186 - DNA, 146 bp, Artificial Sequence
  Bisulfite Padlock Probe
  misc_feature 92, 93, 94, 95, 96, 97: n = A,T,C or G
gactggaagagcactgttactcttaaaccgaaaaactaatatagttggaggctcatcgttcctattcaggcagatgttatcgaggtccgacnnnnnnaataaaaacctacccttcctccaacaatcgatcggatacgcatgaggct

SEQ ID NO: 3187 - DNA, 146 bp, Artificial Sequence
  Bisulfite Padlock Probe
  misc_feature 93, 94, 95, 96, 97, 98: n = A,T,C or G
gactggaagagcactgttactcttaaactttaaaataaataaccgttggaggctcatcgttcctattcaggcagatgttatcgaggtccgacnnnnnnctcaatcacctcctctacaaccaaaaaagatcggatacgcatgaggct

SEQ ID NO: 3188 - DNA, 146 bp, Artificial Sequence
  Bisulfite Padlock Probe
  misc_feature 93, 94, 95, 96, 97, 98: n = A,T,C or G
gactggaagagcactgttactcttaaactttaaaataaataaccgttggaggctcatcgttcctattcaggcagatgttatcgaggtccgacnnnnnnctcaatcacctcctctacaaccgaaaaagatcggatacgcatgaggct

SEQ ID NO: 3189 - DNA, 146 bp, Artificial Sequence
  Bisulfite Padlock Probe
  misc_feature 96, 97, 98, 99, 100, 101: n = A,T,C or G
gactggaagagcactgttactcttaactccgaataaccgaccaaaacgttggaggctcatcgttcctattcaggcagatgttatcgaggtccgacnnnnnnaattcccgcgacacgtatacgacaagatcggatacgcatgaggct

SEQ ID NO: 3190 - DNA, 146 bp, Artificial Sequence
  Bisulfite Padlock Probe
  misc_feature 96, 97, 98, 99, 100, 101: n = A,T,C or G
gactggaagagcactgttactcttaactccgaataaccgaccgaaacgttggaggctcatcgttcctattcaggcagatgttatcgaggtccgacnnnnnnaattcccgcgacacgtatacgacgagatcggatacgcatgaggct

SEQ ID NO: 3191 - DNA, 146 bp, Artificial Sequence
  Bisulfite Padlock Probe
  misc_feature 92, 93, 94, 95, 96, 97: n = A,T,C or G
gactggaagagcactgttactcttactcaaacaacacaataaagttggaggctcatcgttcctattcaggcagatgttatcgaggtccgacnnnnnnattactaaccccgccaaacactaaacctcgatcggatacgcatgaggct

SEQ ID NO: 3192 - DNA, 146 bp, Artificial Sequence
  Bisulfite Padlock Probe
  misc_feature 92, 93, 94, 95, 96, 97: n = A,T,C or G
gactggaagagcactgttactcttactcgaacaacacaataaagttggaggctcatcgttcctattcaggcagatgttatcgaggtccgacnnnnnnattactaaccccgccgaacactaaacctcgatcggatacgcatgaggct

SEQ ID NO: 3193 - DNA, 146 bp, Artificial Sequence
  Bisulfite Padlock Probe
  misc_feature 92, 93, 94, 95, 96, 97: n = A,T,C or G
gactggaagagcactgttactcttcaaaaactctacccctctcgttggaggctcatcgttcctattcaggcagatgttatcgaggtccgacnnnnnnaattcttatcccaaccaaaatctaaaccagatcggatacgcatgaggct

SEQ ID NO: 3194 - DNA, 146 bp, Artificial Sequence
  Bisulfite Padlock Probe
  misc_feature 92, 93, 94, 95, 96, 97: n = A,T,C or G
gactggaagagcactgttactcttcaaaaactctacccctctcgttggaggctcatcgttcctattcaggcagatgttatcgaggtccgacnnnnnnaattcttatcccgaccaaaatctaaaccagatcggatacgcatgaggct

SEQ ID NO: 3195 - DNA, 146 bp, Artificial Sequence
  Bisulfite Padlock Probe
  misc_feature 92, 93, 94, 95, 96, 97: n = A,T,C or G
gactggaagagcactgttacttaaaaatatacacccaaaaatagttggaggctcatcgttcctattcaggcagatgttatcgaggtccgacnnnnnnaaaaacaccccctccaaaacgaacataaagatcggatacgcatgaggct

SEQ ID NO: 3196 - DNA, 146 bp, Artificial Sequence
  Bisulfite Padlock Probe
  misc_feature 92, 93, 94, 95, 96, 97: n = A,T,C or G
gactggaagagcactgttacttaaaaatatacacccgaaaatagttggaggctcatcgttcctattcaggcagatgttatcgaggtccgacnnnnnnaaaaacaccccctccaaaacgaacgtaaagatcggatacgcatgaggct

SEQ ID NO: 3197 - DNA, 146 bp, Artificial Sequence
  Bisulfite Padlock Probe
  misc_feature 96, 97, 98, 99, 100, 101: n = A,T,C or G
gactggaagagcactgttacttaaacaacgaaaatatatccaaaatcgttggaggctcatcgttcctattcaggcagatgttatcgaggtccgacnnnnnnaaacctccgacgaaaacacgacaaagatcggatacgcatgaggct

SEQ ID NO: 3198 - DNA, 146 bp, Artificial Sequence
  Bisulfite Padlock Probe
  misc_feature 96, 97, 98, 99, 100, 101: n = A,T,C or G
gactggaagagcactgttacttaaacaacgaaaatatatccgaaatcgttggaggctcatcgttcctattcaggcagatgttatcgaggtccgacnnnnnnaaacctccgacgaaaacacgacgaagatcggatacgcatgaggct

SEQ ID NO: 3199 - DNA, 146 bp, Artificial Sequence
  Bisulfite Padlock Probe
  misc_feature 95, 96, 97, 98, 99, 100: n = A,T,C or G
gactggaagagcactgttacttaaattcgaatcccaatactacactgttggaggctcatcgttcctattcaggcagatgttatcgaggtccgacnnnnnnataacgctcattaaacaaaataaccagatcggatacgcatgaggct

SEQ ID NO: 3200 - DNA, 146 bp, Artificial Sequence
  Bisulfite Padlock Probe
  misc_feature 95, 96, 97, 98, 99, 100: n = A,T,C or G
gactggaagagcactgttacttaaattcgaatcccgatactacactgttggaggctcatcgttcctattcaggcagatgttatcgaggtccgacnnnnnnataacgctcattaaacgaaataaccagatcggatacgcatgaggct

SEQ ID NO: 3201 - DNA, 146 bp, Artificial Sequence
  Bisulfite Padlock Probe
  misc_feature 93, 94, 95, 96, 97, 98: n = A,T,C or G
gactggaagagcactgttacttaacccaactcactcctacttacgttggaggctcatcgttcctattcaggcagatgttatcgaggtccgacnnnnnntcttcccatttctcaaaaccacaaaccagatcggatacgcatgaggct

SEQ ID NO: 3202 - DNA, 146 bp, Artificial Sequence
  Bisulfite Padlock Probe
  misc_feature 93, 94, 95, 96, 97, 98: n = A,T,C or G
gactggaagagcactgttacttaacccaactcgctcctacttacgttggaggctcatcgttcctattcaggcagatgttatcgaggtccgacnnnnnntcttcccatttctcgaaaccacaaaccagatcggatacgcatgaggct

SEQ ID NO: 3203 - DNA, 146 bp, Artificial Sequence
  Bisulfite Padlock Probe
  misc_feature 92, 93, 94, 95, 96, 97: n = A,T,C or G
gactggaagagcactgttacttaaccccaacaacctccctctagttggaggctcatcgttcctattcaggcagatgttatcgaggtccgacnnnnnntctataatctacccttaatctcaaaatttgatcggatacgcatgaggct

SEQ ID NO: 3204 - DNA, 146 bp, Artificial Sequence
  Bisulfite Padlock Probe
  misc_feature 96, 97, 98, 99, 100, 101: n = A,T,C or G
gactggaagagcactgttacttaatcttcaatactaacacccaattagttggaggctcatcgttcctattcaggcagatgttatcgaggtccgacnnnnnnaatacccgccaaactacctaaaaacgatcggatacgcatgaggct

SEQ ID NO: 3205 - DNA, 146 bp, Artificial Sequence
  Bisulfite Padlock Probe
  misc_feature 96, 97, 98, 99, 100, 101: n = A,T,C or G
gactggaagagcactgttacttaatcttcaatactaacacccaattagttggaggctcatcgttcctattcaggcagatgttatcgaggtccgacnnnnnnaatacccgccgaactacctaaaaacgatcggatacgcatgaggct

SEQ ID NO: 3206 - DNA, 146 bp, Artificial Sequence
  Bisulfite Padlock Probe
  misc_feature 94, 95, 96, 97, 98, 99: n = A,T,C or G
gactggaagagcactgttacttacaataacatcaccaaacactacgttggaggctcatcgttcctattcaggcagatgttatcgaggtccgacnnnnnnaaaaatccttaaaaacaacccgcacccgatcggatacgcatgaggct

SEQ ID NO: 3207 - DNA, 146 bp, Artificial Sequence
  Bisulfite Padlock Probe
  misc_feature 94, 95, 96, 97, 98, 99: n = A,T,C or G
gactggaagagcactgttacttacaataacatcaccaaacactacgttggaggctcatcgttcctattcaggcagatgttatcgaggtccgacnnnnnnaaaaatccttaaaaacaacccgcgcccgatcggatacgcatgaggct

SEQ ID NO: 3208 - DNA, 146 bp, Artificial Sequence
  Bisulfite Padlock Probe
  misc_feature 96, 97, 98, 99, 100, 101: n = A,T,C or G
gactggaagagcactgttacttaccaattaacattataattaaatacgttggaggctcatcgttcctattcaggcagatgttatcgaggtccgacnnnnnnctaacaattaaaccgaccaacaaaagatcggatacgcatgaggct

SEQ ID NO: 3209 - DNA, 146 bp, Artificial Sequence
  Bisulfite Padlock Probe
  misc_feature 96, 97, 98, 99, 100, 101: n = A,T,C or G
gactggaagagcactgttacttaccaattaacattataattaaatacgttggaggctcatcgttcctattcaggcagatgttatcgaggtccgacnnnnnnctaacaattaaaccgaccgacaaaagatcggatacgcatgaggct

SEQ ID NO: 3210 - DNA, 146 bp, Artificial Sequence
  Bisulfite Padlock Probe
  misc_feature 95, 96, 97, 98, 99, 100: n = A,T,C or G
gactggaagagcactgttacttacccaaattaccttaactaaaacagttggaggctcatcgttcctattcaggcagatgttatcgaggtccgacnnnnnnccttaactacgatctaaacctccatcgatcggatacgcatgaggct

SEQ ID NO: 3211 - DNA, 146 bp, Artificial Sequence
  Bisulfite Padlock Probe
  misc_feature 95, 96, 97, 98, 99, 100: n = A,T,C or G
gactggaagagcactgttacttacccaaattaccttaactaaaacagttggaggctcatcgttcctattcaggcagatgttatcgaggtccgacnnnnnnccttaactacgatctaaacctccgtcgatcggatacgcatgaggct

SEQ ID NO: 3212 - DNA, 146 bp, Artificial Sequence
  Bisulfite Padlock Probe
  misc_feature 93, 94, 95, 96, 97, 98: n = A,T,C or G
gactggaagagcactgttacttatttacaaaattaaactactctgttggaggctcatcgttcctattcaggcagatgttatcgaggtccgacnnnnnntaccctaaataccccttcctaataatccgatcggatacgcatgaggct

SEQ ID NO: 3213 - DNA, 146 bp, Artificial Sequence
  Bisulfite Padlock Probe
  misc_feature 93, 94, 95, 96, 97, 98: n = A,T,C or G
gactggaagagcactgttacttatttacgaaattaaactactctgttggaggctcatcgttcctattcaggcagatgttatcgaggtccgacnnnnnntaccctaaataccccttcctaataatccgatcggatacgcatgaggct

SEQ ID NO: 3214 - DNA, 146 bp, Artificial Sequence
  Bisulfite Padlock Probe
  misc_feature 92, 93, 94, 95, 96, 97: n = A,T,C or G
gactggaagagcactgttacttcaccctactcctcaatctcctgttggaggctcatcgttcctattcaggcagatgttatcgaggtccgacnnnnnncaactacgttctccactaccacatatccagatcggatacgcatgaggct

SEQ ID NO: 3215 - DNA, 146 bp, Artificial Sequence
  Bisulfite Padlock Probe
  misc_feature 92, 93, 94, 95, 96, 97: n = A,T,C or G
gactggaagagcactgttacttcaccctactcctcaatctcctgttggaggctcatcgttcctattcaggcagatgttatcgaggtccgacnnnnnncaactacgttctccactaccacgtatccagatcggatacgcatgaggct

SEQ ID NO: 3216 - DNA, 146 bp, Artificial Sequence
  Bisulfite Padlock Probe
  misc_feature 93, 94, 95, 96, 97, 98: n = A,T,C or G
gactggaagagcactgttacttccactttatctaccaacccctagttggaggctcatcgttcctattcaggcagatgttatcgaggtccgacnnnnnngaacgaacacccaaacccaaacactatagatcggatacgcatgaggct

SEQ ID NO: 3217 - DNA, 146 bp, Artificial Sequence
  Bisulfite Padlock Probe
  misc_feature 93, 94, 95, 96, 97, 98: n = A,T,C or G
gactggaagagcactgttacttccactttatctaccgacccctagttggaggctcatcgttcctattcaggcagatgttatcgaggtccgacnnnnnngaacgaacacccaaacccaaacgctatagatcggatacgcatgaggct

SEQ ID NO: 3218 - DNA, 146 bp, Artificial Sequence
  Bisulfite Padlock Probe
  misc_feature 93, 94, 95, 96, 97, 98: n = A,T,C or G
gactggaagagcactgttacttccctaaacctaatcaccaaaaagttggaggctcatcgttcctattcaggcagatgttatcgaggtccgacnnnnnntaataaaacaaccaatacaacgcaaacagatcggatacgcatgaggct

SEQ ID NO: 3219 - DNA, 146 bp, Artificial Sequence
  Bisulfite Padlock Probe
  misc_feature 93, 94, 95, 96, 97, 98: n = A,T,C or G
gactggaagagcactgttacttccctaaacctaatcgccaaaaagttggaggctcatcgttcctattcaggcagatgttatcgaggtccgacnnnnnntaataaaacaaccaatacaacgcgaacagatcggatacgcatgaggct

SEQ ID NO: 3220 - DNA, 146 bp, Artificial Sequence
  Bisulfite Padlock Probe
  misc_feature 93, 94, 95, 96, 97, 98: n = A,T,C or G
gactggaagagcactgttacttccctcccaaacgatacaactccgttggaggctcatcgttcctattcaggcagatgttatcgaggtccgacnnnnnnacctaaaaccaatccctacaccaaacccgatcggatacgcatgaggct

SEQ ID NO: 3221 - DNA, 146 bp, Artificial Sequence
  Bisulfite Padlock Probe
  misc_feature 93, 94, 95, 96, 97, 98: n = A,T,C or G
gactggaagagcactgttacttccctcccaaacgatacgactccgttggaggctcatcgttcctattcaggcagatgttatcgaggtccgacnnnnnnacctaaaaccaatccctacaccgaacccgatcggatacgcatgaggct

SEQ ID NO: 3222 - DNA, 146 bp, Artificial Sequence
  Bisulfite Padlock Probe
  misc_feature 94, 95, 96, 97, 98, 99: n = A,T,C or G
gactggaagagcactgttacttcctaaacatctcctccataaacagttggaggctcatcgttcctattcaggcagatgttatcgaggtccgacnnnnnnacctaaacatctacaacaactaaatccgatcggatacgcatgaggct

SEQ ID NO: 3223 - DNA, 146 bp, Artificial Sequence
  Bisulfite Padlock Probe
  misc_feature 94, 95, 96, 97, 98, 99: n = A,T,C or G
gactggaagagcactgttacttcctaaacatctcctccataaacagttggaggctcatcgttcctattcaggcagatgttatcgaggtccgacnnnnnnacctaaacatctacgacaactaaatccgatcggatacgcatgaggct

SEQ ID NO: 3224 - DNA, 146 bp, Artificial Sequence
  Bisulfite Padlock Probe
  misc_feature 93, 94, 95, 96, 97, 98: n = A,T,C or G
gactggaagagcactgttacttcgtactaaccgaacccaaaaacgttggaggctcatcgttcctattcaggcagatgttatcgaggtccgacnnnnnnaaacacctaccaaaaccaataacaaaccgatcggatacgcatgaggct

SEQ ID NO: 3225 - DNA, 146 bp, Artificial Sequence
  Bisulfite Padlock Probe
  misc_feature 93, 94, 95, 96, 97, 98: n = A,T,C or G
gactggaagagcactgttacttcgtactaaccgaacccgaaaacgttggaggctcatcgttcctattcaggcagatgttatcgaggtccgacnnnnnnaaacacctaccaaaaccaataacaaaccgatcggatacgcatgaggct

SEQ ID NO: 3226 - DNA, 146 bp, Artificial Sequence
  Bisulfite Padlock Probe
  misc_feature 95, 96, 97, 98, 99, 100: n = A,T,C or G
gactggaagagcactgttacttctaaataaatacgaaatcaaaaaagttggaggctcatcgttcctattcaggcagatgttatcgaggtccgacnnnnnnccgaaacgcgaaacaaaaatacaaacgatcggatacgcatgaggct

SEQ ID NO: 3227 - DNA, 146 bp, Artificial Sequence
  Bisulfite Padlock Probe
  misc_feature 95, 96, 97, 98, 99, 100: n = A,T,C or G
gactggaagagcactgttacttctaaataaatacgaaatcgaaaaagttggaggctcatcgttcctattcaggcagatgttatcgaggtccgacnnnnnnccgaaacgcgaaacgaaaatacaaacgatcggatacgcatgaggct

SEQ ID NO: 3228 - DNA, 146 bp, Artificial Sequence
  Bisulfite Padlock Probe
  misc_feature 93, 94, 95, 96, 97, 98: n = A,T,C or G
gactggaagagcactgttacttctatccatcaaactacttacaagttggaggctcatcgttcctattcaggcagatgttatcgaggtccgacnnnnnnctaaacaaaactaatttacatttaccttgatcggatacgcatgaggct

SEQ ID NO: 3229 - DNA, 146 bp, Artificial Sequence
  Bisulfite Padlock Probe
  misc_feature 93, 94, 95, 96, 97, 98: n = A,T,C or G
gactggaagagcactgttacttctatccatcaaactacttacaagttggaggctcatcgttcctattcaggcagatgttatcgaggtccgacnnnnnnctaaacgaaactaatttacatttaccttgatcggatacgcatgaggct

SEQ ID NO: 3230 - DNA, 146 bp, Artificial Sequence
  Bisulfite Padlock Probe
  misc_feature 92, 93, 94, 95, 96, 97: n = A,T,C or G
gactggaagagcactgttactttaaaccgatcataacccctatgttggaggctcatcgttcctattcaggcagatgttatcgaggtccgacnnnnnntcaataccacaacaaacttctttcacattgatcggatacgcatgaggct

SEQ ID NO: 3231 - DNA, 146 bp, Artificial Sequence
  Bisulfite Padlock Probe
  misc_feature 92, 93, 94, 95, 96, 97: n = A,T,C or G
gactggaagagcactgttactttaaaccgatcgtaacccctatgttggaggctcatcgttcctattcaggcagatgttatcgaggtccgacnnnnnntcaataccacaacaaacttctttcacattgatcggatacgcatgaggct

SEQ ID NO: 3232 - DNA, 146 bp, Artificial Sequence
  Bisulfite Padlock Probe
  misc_feature 92, 93, 94, 95, 96, 97: n = A,T,C or G
gactggaagagcactgttactttaccccgccaaaacaaacaacgttggaggctcatcgttcctattcaggcagatgttatcgaggtccgacnnnnnnctataaccgacccactacttacacccaatgatcggatacgcatgaggct

SEQ ID NO: 3233 - DNA, 146 bp, Artificial Sequence
  Bisulfite Padlock Probe
  misc_feature 92, 93, 94, 95, 96, 97: n = A,T,C or G
gactggaagagcactgttactttaccccgccgaaacaaacaacgttggaggctcatcgttcctattcaggcagatgttatcgaggtccgacnnnnnnctataaccgacccgctacttacacccaatgatcggatacgcatgaggct

SEQ ID NO: 3234 - DNA, 146 bp, Artificial Sequence
  Bisulfite Padlock Probe
  misc_feature 94, 95, 96, 97, 98, 99: n = A,T,C or G
gactggaagagcactgttactttatcctaataataataaataaaagttggaggctcatcgttcctattcaggcagatgttatcgaggtccgacnnnnnntctacaacccttcattaccctacctaagatcggatacgcatgaggct

SEQ ID NO: 3235 - DNA, 146 bp, Artificial Sequence
  Bisulfite Padlock Probe
  misc_feature 95, 96, 97, 98, 99, 100: n = A,T,C or G
gactggaagagcactgttactttatttacgtccatccgccaactacgttggaggctcatcgttcctattcaggcagatgttatcgaggtccgacnnnnnnctaacgccgcttcactcctactcaaagatcggatacgcatgaggct

SEQ ID NO: 3236 - DNA, 146 bp, Artificial Sequence
  Bisulfite Padlock Probe
  misc_feature 95, 96, 97, 98, 99, 100: n = A,T,C or G
gactggaagagcactgttactttatttacgtccatccgccgactacgttggaggctcatcgttcctattcaggcagatgttatcgaggtccgacnnnnnnctaacgccgcttcgctcctactcaaagatcggatacgcatgaggct

SEQ ID NO: 3237 - DNA, 146 bp, Artificial Sequence
  Bisulfite Padlock Probe
  misc_feature 94, 95, 96, 97, 98, 99: n = A,T,C or G
gactggaagagcactgttactttattttcattaattaaataaaaagttggaggctcatcgttcctattcaggcagatgttatcgaggtccgacnnnnnnaataacgaaaaaccgaaaaccaaaaacgatcggatacgcatgaggct

SEQ ID NO: 3238 - DNA, 146 bp, Artificial Sequence
  Bisulfite Padlock Probe
  misc_feature 94, 95, 96, 97, 98, 99: n = A,T,C or G
gactggaagagcactgttactttattttcattaattaaataaaaagttggaggctcatcgttcctattcaggcagatgttatcgaggtccgacnnnnnnaataacgaaaaaccgaaaaccgaaaacgatcggatacgcatgaggct

SEQ ID NO: 3239 - DNA, 146 bp, Artificial Sequence
  Bisulfite Padlock Probe
  misc_feature 95, 96, 97, 98, 99, 100: n = A,T,C or G
gactggaagagcactgttactttcctatataaaaataaaacttaaagttggaggctcatcgttcctattcaggcagatgttatcgaggtccgacnnnnnncaatttctaaaatactaaataaaaacgatcggatacgcatgaggct

SEQ ID NO: 3240 - DNA, 146 bp, Artificial Sequence
  Bisulfite Padlock Probe
  misc_feature 95, 96, 97, 98, 99, 100: n = A,T,C or G
gactggaagagcactgttactttctaatttctacctcaaccaaaaagttggaggctcatcgttcctattcaggcagatgttatcgaggtccgacnnnnnnccgcaaacaccaacacctctatcctagatcggatacgcatgaggct

SEQ ID NO: 3241 - DNA, 146 bp, Artificial Sequence
  Bisulfite Padlock Probe
  misc_feature 95, 96, 97, 98, 99, 100: n = A,T,C or G
gactggaagagcactgttactttctaatttctacctcgaccaaaaagttggaggctcatcgttcctattcaggcagatgttatcgaggtccgacnnnnnnccgcaaacaccaacgcctctatcctagatcggatacgcatgaggct

SEQ ID NO: 3242 - DNA, 146 bp, Artificial Sequence
  Bisulfite Padlock Probe
  misc_feature 93, 94, 95, 96, 97, 98: n = A,T,C or G
gactggaagagcactgttactttctacgcccgacactattaaaagttggaggctcatcgttcctattcaggcagatgttatcgaggtccgacnnnnnnaaaaaccgcctataaaaaccccgcaaacgatcggatacgcatgaggct

SEQ ID NO: 3243 - DNA, 146 bp, Artificial Sequence
  Bisulfite Padlock Probe
  misc_feature 93, 94, 95, 96, 97, 98: n = A,T,C or G
gactggaagagcactgttactttctacgcccgacgctattaaaagttggaggctcatcgttcctattcaggcagatgttatcgaggtccgacnnnnnnaaaaaccgcctataaaaaccccgcgaacgatcggatacgcatgaggct

SEQ ID NO: 3244 - DNA, 146 bp, Artificial Sequence
  Bisulfite Padlock Probe
  misc_feature 96, 97, 98, 99, 100, 101: n = A,T,C or G
gactggaagagcactgttactttctattccgcaaccaaaattttaacgttggaggctcatcgttcctattcaggcagatgttatcgaggtccgacnnnnnnacataaacaccttcaaactcaacccgatcggatacgcatgaggct

SEQ ID NO: 3245 - DNA, 146 bp, Artificial Sequence
  Bisulfite Padlock Probe
  misc_feature 96, 97, 98, 99, 100, 101: n = A,T,C or G
gactggaagagcactgttactttctattccgcaaccgaaattttaacgttggaggctcatcgttcctattcaggcagatgttatcgaggtccgacnnnnnnacataaacgccttcaaactcaacccgatcggatacgcatgaggct

SEQ ID NO: 3246 - DNA, 146 bp, Artificial Sequence
  Bisulfite Padlock Probe
  misc_feature 95, 96, 97, 98, 99, 100: n = A,T,C or G
gactggaagagcactgttactttctccaattaataatcaccaaaacgttggaggctcatcgttcctattcaggcagatgttatcgaggtccgacnnnnnntctcctttacgccaaaaaatcaaaaagatcggatacgcatgaggct

SEQ ID NO: 3247 - DNA, 146 bp, Artificial Sequence
  Bisulfite Padlock Probe
  misc_feature 95, 96, 97, 98, 99, 100: n = A,T,C or G
gactggaagagcactgttactttctccgattaataatcaccaaaacgttggaggctcatcgttcctattcaggcagatgttatcgaggtccgacnnnnnntctcctttacgccgaaaaatcaaaaagatcggatacgcatgaggct

SEQ ID NO: 3248 - DNA, 146 bp, Artificial Sequence
  Bisulfite Padlock Probe
  misc_feature 93, 94, 95, 96, 97, 98: n = A,T,C or G
gactggaagagcactgttactttctctactactatataacaattgttggaggctcatcgttcctattcaggcagatgttatcgaggtccgacnnnnnncacctactaccaaaaacttttctctaccgatcggatacgcatgaggct

SEQ ID NO: 3249 - DNA, 146 bp, Artificial Sequence
  Bisulfite Padlock Probe
  misc_feature 93, 94, 95, 96, 97, 98: n = A,T,C or G
gactggaagagcactgttacttttctaaaacacctctacaatccgttggaggctcatcgttcctattcaggcagatgttatcgaggtccgacnnnnnncctatcgcccaaaactctaaaccaaaacgatcggatacgcatgaggct

SEQ ID NO: 3250 - DNA, 146 bp, Artificial Sequence
  Bisulfite Padlock Probe
  misc_feature 93, 94, 95, 96, 97, 98: n = A,T,C or G
gactggaagagcactgttacttttctaaaacacctctacaatccgttggaggctcatcgttcctattcaggcagatgttatcgaggtccgacnnnnnncctatcgcccgaaactctaaaccaaaacgatcggatacgcatgaggct

SEQ ID NO: 3251 - DNA, 146 bp, Artificial Sequence
  Bisulfite Padlock Probe
  misc_feature 95, 96, 97, 98, 99, 100: n = A,T,C or G
gactggaagagcactgttacttttctcccgcaaactattttctaccgttggaggctcatcgttcctattcaggcagatgttatcgaggtccgacnnnnnnttcctaaaccgcacccaaaaactcccgatcggatacgcatgaggct

SEQ ID NO: 3252 - DNA, 146 bp, Artificial Sequence
  Bisulfite Padlock Probe
  misc_feature 95, 96, 97, 98, 99, 100: n = A,T,C or G
gactggaagagcactgttacttttctcccgcgaactattttctaccgttggaggctcatcgttcctattcaggcagatgttatcgaggtccgacnnnnnnttcctaaaccgcacccgaaaactcccgatcggatacgcatgaggct

SEQ ID NO: 3253 - DNA, 146 bp, Artificial Sequence
  Bisulfite Padlock Probe
  misc_feature 93, 94, 95, 96, 97, 98: n = A,T,C or G
gactggaagagcactgttacttttcttcctcaaaatctacctacgttggaggctcatcgttcctattcaggcagatgttatcgaggtccgacnnnnnnaaaaaccctttactcttcccaaccctttgatcggatacgcatgaggct

SEQ ID NO: 3254 - DNA, 146 bp, Artificial Sequence
  Bisulfite Padlock Probe
  misc_feature 92, 93, 94, 95, 96, 97: n = A,T,C or G
gactggaagagcactgttactttttatttcaacatcactttacgttggaggctcatcgttcctattcaggcagatgttatcgaggtccgacnnnnnnccgaacgaccgcataatattcaacaaaccgatcggatacgcatgaggct

SEQ ID NO: 3255 - DNA, 146 bp, Artificial Sequence
  Bisulfite Padlock Probe
  misc_feature 92, 93, 94, 95, 96, 97: n = A,T,C or G
gactggaagagcactgttactttttatttcgacatcactttacgttggaggctcatcgttcctattcaggcagatgttatcgaggtccgacnnnnnnccgaacgaccgcataatattcaacgaaccgatcggatacgcatgaggct

SEQ ID NO: 3256 - DNA, 146 bp, Artificial Sequence
  Bisulfite Padlock Probe
  misc_feature 96, 97, 98, 99, 100, 101: n = A,T,C or G
gactggaagagcactgttactttttcttactcaaaaactccaaacctgttggaggctcatcgttcctattcaggcagatgttatcgaggtccgacnnnnnncacatctacctacaactccataaacgatcggatacgcatgaggct

SEQ ID NO: 3257 - DNA, 146 bp, Artificial Sequence
  Bisulfite Padlock Probe
  misc_feature 96, 97, 98, 99, 100, 101: n = A,T,C or G
gactggaagagcactgttactttttcttactcgaaaactccaaacctgttggaggctcatcgttcctattcaggcagatgttatcgaggtccgacnnnnnncacatctacctacaactccataaacgatcggatacgcatgaggct

SEQ ID NO: 3258 - DNA, 146 bp, Artificial Sequence
  Bisulfite Padlock Probe
  misc_feature 93, 94, 95, 96, 97, 98: n = A,T,C or G
gactggaagagcactgttataaaaaccaaaataacaactaaaaagttggaggctcatcgttcctattcaggcagatgttatcgaggtccgacnnnnnnacttacccaattcaccactcctacccccgatcggatacgcatgaggct

SEQ ID NO: 3259 - DNA, 146 bp, Artificial Sequence
  Bisulfite Padlock Probe
  misc_feature 93, 94, 95, 96, 97, 98: n = A,T,C or G
gactggaagagcactgttataaaaaccaacacaaaatctaaaaagttggaggctcatcgttcctattcaggcagatgttatcgaggtccgacnnnnnnaaaaataaaaacgtaaacgccaaaaaccgatcggatacgcatgaggct

SEQ ID NO: 3260 - DNA, 146 bp, Artificial Sequence
  Bisulfite Padlock Probe
  misc_feature 93, 94, 95, 96, 97, 98: n = A,T,C or G
gactggaagagcactgttataaaaaccaacacgaaatctaaaaagttggaggctcatcgttcctattcaggcagatgttatcgaggtccgacnnnnnnaaaaataaaaacgtaaacgccgaaaaccgatcggatacgcatgaggct

SEQ ID NO: 3261 - DNA, 146 bp, Artificial Sequence
  Bisulfite Padlock Probe
  misc_feature 93, 94, 95, 96, 97, 98: n = A,T,C or G
gactggaagagcactgttataaaaaccgaaataacaactaaaaagttggaggctcatcgttcctattcaggcagatgttatcgaggtccgacnnnnnnacttacccaattcaccactcctacccccgatcggatacgcatgaggct

SEQ ID NO: 3262 - DNA, 146 bp, Artificial Sequence
  Bisulfite Padlock Probe
  misc_feature 93, 94, 95, 96, 97, 98: n = A,T,C or G
gactggaagagcactgttataaaaaccttaacaaaactaaaaccgttggaggctcatcgttcctattcaggcagatgttatcgaggtccgacnnnnnntaacgaaaacaataaccaaaactttctcgatcggatacgcatgaggct

SEQ ID NO: 3263 - DNA, 146 bp, Artificial Sequence
  Bisulfite Padlock Probe
  misc_feature 93, 94, 95, 96, 97, 98: n = A,T,C or G
gactggaagagcactgttataaaaaccttaacgaaactaaaaccgttggaggctcatcgttcctattcaggcagatgttatcgaggtccgacnnnnnntaacgaaaacaataaccgaaactttctcgatcggatacgcatgaggct

SEQ ID NO: 3264 - DNA, 146 bp, Artificial Sequence
  Bisulfite Padlock Probe
  misc_feature 94, 95, 96, 97, 98, 99: n = A,T,C or G
gactggaagagcactgttataaaaactcccgcaactaacaaaaacgttggaggctcatcgttcctattcaggcagatgttatcgaggtccgacnnnnnncttacgaacgtctccaaacccaaccacgatcggatacgcatgaggct

SEQ ID NO: 3265 - DNA, 146 bp, Artificial Sequence
  Bisulfite Padlock Probe
  misc_feature 94, 95, 96, 97, 98, 99: n = A,T,C or G
gactggaagagcactgttataaaaactcccgcaactaacgaaaacgttggaggctcatcgttcctattcaggcagatgttatcgaggtccgacnnnnnncttacgaacgtctccgaacccaaccacgatcggatacgcatgaggct

SEQ ID NO: 3266 - DNA, 146 bp, Artificial Sequence
  Bisulfite Padlock Probe
  misc_feature 93, 94, 95, 96, 97, 98: n = A,T,C or G
gactggaagagcactgttataaaaactccgccaattaactatacgttggaggctcatcgttcctattcaggcagatgttatcgaggtccgacnnnnnnaacgacaaaaacgccttccataaaacccgatcggatacgcatgaggct

SEQ ID NO: 3267 - DNA, 146 bp, Artificial Sequence
  Bisulfite Padlock Probe
  misc_feature 93, 94, 95, 96, 97, 98: n = A,T,C or G
gactggaagagcactgttataaaaactccgccgattaactatacgttggaggctcatcgttcctattcaggcagatgttatcgaggtccgacnnnnnnaacgacaaaaacgccttccgtaaaacccgatcggatacgcatgaggct

SEQ ID NO: 3268 - DNA, 146 bp, Artificial Sequence
  Bisulfite Padlock Probe
  misc_feature 92, 93, 94, 95, 96, 97: n = A,T,C or G
gactggaagagcactgttataaaacataataaacgcgaaacacgttggaggctcatcgttcctattcaggcagatgttatcgaggtccgacnnnnnntaaaaaccgccgaacccaaataaaaactagatcggatacgcatgaggct

SEQ ID NO: 3269 - DNA, 146 bp, Artificial Sequence
  Bisulfite Padlock Probe
  misc_feature 92, 93, 94, 95, 96, 97: n = A,T,C or G
gactggaagagcactgttataaaacataataaacgcgaaacgcgttggaggctcatcgttcctattcaggcagatgttatcgaggtccgacnnnnnntaaaaaccgccgaacccgaataaaaactagatcggatacgcatgaggct

SEQ ID NO: 3270 - DNA, 146 bp, Artificial Sequence
  Bisulfite Padlock Probe
  misc_feature 94, 95, 96, 97, 98, 99: n = A,T,C or G
gactggaagagcactgttataaaaccttaaaccgtaaccaacaaagttggaggctcatcgttcctattcaggcagatgttatcgaggtccgacnnnnnnactactaatacccctaaaccccaccccgatcggatacgcatgaggct

SEQ ID NO: 3271 - DNA, 146 bp, Artificial Sequence
  Bisulfite Padlock Probe
  misc_feature 94, 95, 96, 97, 98, 99: n = A,T,C or G
gactggaagagcactgttataaaaccttaaaccgtaaccgacaaagttggaggctcatcgttcctattcaggcagatgttatcgaggtccgacnnnnnnactactaatacccctaaaccccaccccgatcggatacgcatgaggct

SEQ ID NO: 3272 - DNA, 146 bp, Artificial Sequence
  Bisulfite Padlock Probe
  misc_feature 94, 95, 96, 97, 98, 99: n = A,T,C or G
gactggaagagcactgttataaaactaacgatcaaaaacctcaacgttggaggctcatcgttcctattcaggcagatgttatcgaggtccgacnnnnnncaaaaacgataccaccaaacacaaccagatcggatacgcatgaggct

SEQ ID NO: 3273 - DNA, 146 bp, Artificial Sequence
  Bisulfite Padlock Probe
  misc_feature 94, 95, 96, 97, 98, 99: n = A,T,C or G
gactggaagagcactgttataaaactaacgatcgaaaacctcaacgttggaggctcatcgttcctattcaggcagatgttatcgaggtccgacnnnnnncaaaaacgataccaccaaacacgaccagatcggatacgcatgaggct

SEQ ID NO: 3274 - DNA, 146 bp, Artificial Sequence
  Bisulfite Padlock Probe
  misc_feature 96, 97, 98, 99, 100, 101: n = A,T,C or G
gactggaagagcactgttataaaataaataaaaataaaacccaaaaagttggaggctcatcgttcctattcaggcagatgttatcgaggtccgacnnnnnnaaaaacccaacgactcaaaaacgcagatcggatacgcatgaggct

SEQ ID NO: 3275 - DNA, 146 bp, Artificial Sequence
  Bisulfite Padlock Probe
  misc_feature 96, 97, 98, 99, 100, 101: n = A,T,C or G
gactggaagagcactgttataaaataaataaaaataaaacccaaaaagttggaggctcatcgttcctattcaggcagatgttatcgaggtccgacnnnnnnaaaaacccaacgactcaaaaacgcggatcggatacgcatgaggct

SEQ ID NO: 3276 - DNA, 146 bp, Artificial Sequence
  Bisulfite Padlock Probe
  misc_feature 92, 93, 94, 95, 96, 97: n = A,T,C or G
gactggaagagcactgttataaaatactaaaacttaataactcgttggaggctcatcgttcctattcaggcagatgttatcgaggtccgacnnnnnntattatatacatttaaatcaacatcaatcgatcggatacgcatgaggct

SEQ ID NO: 3277 - DNA, 146 bp, Artificial Sequence
  Bisulfite Padlock Probe
  misc_feature 94, 95, 96, 97, 98, 99: n = A,T,C or G
gactggaagagcactgttataaaatactccaaatcgacataaaaagttggaggctcatcgttcctattcaggcagatgttatcgaggtccgacnnnnnnaactaaacttaatccccacccctcctcgatcggatacgcatgaggct

SEQ ID NO: 3278 - DNA, 146 bp, Artificial Sequence
  Bisulfite Padlock Probe
  misc_feature 94, 95, 96, 97, 98, 99: n = A,T,C or G
gactggaagagcactgttataaaatactccaaatcgacgtaaaaagttggaggctcatcgttcctattcaggcagatgttatcgaggtccgacnnnnnnaactaaacttaatccccacccctcctcgatcggatacgcatgaggct

SEQ ID NO: 3279 - DNA, 146 bp, Artificial Sequence
  Bisulfite Padlock Probe
  misc_feature 92, 93, 94, 95, 96, 97: n = A,T,C or G
gactggaagagcactgttataaaatattaactctccaacaaacgttggaggctcatcgttcctattcaggcagatgttatcgaggtccgacnnnnnnaaaataaatatacatacctatatataacagatcggatacgcatgaggct

SEQ ID NO: 3280 - DNA, 146 bp, Artificial Sequence
  Bisulfite Padlock Probe
  misc_feature 92, 93, 94, 95, 96, 97: n = A,T,C or G
gactggaagagcactgttataaaatattaactctccaacaaacgttggaggctcatcgttcctattcaggcagatgttatcgaggtccgacnnnnnnaaaataaatatacgtacctatatataacagatcggatacgcatgaggct

SEQ ID NO: 3281 - DNA, 146 bp, Artificial Sequence
  Bisulfite Padlock Probe
  misc_feature 93, 94, 95, 96, 97, 98: n = A,T,C or G
gactggaagagcactgttataaaattcttccctaaacaactatagttggaggctcatcgttcctattcaggcagatgttatcgaggtccgacnnnnnnaaaaaccccctaaatcttcaaaacacccgatcggatacgcatgaggct

SEQ ID NO: 3282 - DNA, 146 bp, Artificial Sequence
  Bisulfite Padlock Probe
  misc_feature 93, 94, 95, 96, 97, 98: n = A,T,C or G
gactggaagagcactgttataaaattcttccctaaacgactatagttggaggctcatcgttcctattcaggcagatgttatcgaggtccgacnnnnnnaaaaaccccctaaatcttcaaaacgcccgatcggatacgcatgaggct

SEQ ID NO: 3283 - DNA, 146 bp, Artificial Sequence
  Bisulfite Padlock Probe
  misc_feature 94, 95, 96, 97, 98, 99: n = A,T,C or G
gactggaagagcactgttataaaatttcatttattacattaaaacgttggaggctcatcgttcctattcaggcagatgttatcgaggtccgacnnnnnnccactcctaatcttcgtcaactcctccgatcggatacgcatgaggct

SEQ ID NO: 3284 - DNA, 146 bp, Artificial Sequence
  Bisulfite Padlock Probe
  misc_feature 94, 95, 96, 97, 98, 99: n = A,T,C or G
gactggaagagcactgttataaaatttcgtttattacattaaaacgttggaggctcatcgttcctattcaggcagatgttatcgaggtccgacnnnnnnccactcctaatcttcgtcgactcctccgatcggatacgcatgaggct

SEQ ID NO: 3285 - DNA, 146 bp, Artificial Sequence
  Bisulfite Padlock Probe
  misc_feature 93, 94, 95, 96, 97, 98: n = A,T,C or G
gactggaagagcactgttataaaattttaacattaaaattaaaagttggaggctcatcgttcctattcaggcagatgttatcgaggtccgacnnnnnnaacacatcgaaaactctcactactaaacgatcggatacgcatgaggct

SEQ ID NO: 3286 - DNA, 146 bp, Artificial Sequence
  Bisulfite Padlock Probe
  misc_feature 93, 94, 95, 96, 97, 98: n = A,T,C or G
gactggaagagcactgttataaaattttaacgttaaaattaaaagttggaggctcatcgttcctattcaggcagatgttatcgaggtccgacnnnnnnaacacatcgaaaactctcgctactaaacgatcggatacgcatgaggct

SEQ ID NO: 3287 - DNA, 146 bp, Artificial Sequence
  Bisulfite Padlock Probe
  misc_feature 94, 95, 96, 97, 98, 99: n = A,T,C or G
gactggaagagcactgttataaacaacacactccaatcttcccaagttggaggctcatcgttcctattcaggcagatgttatcgaggtccgacnnnnnnataacgaacgtaaaacgcgacactaccgatcggatacgcatgaggct

SEQ ID NO: 3288 - DNA, 146 bp, Artificial Sequence
  Bisulfite Padlock Probe
  misc_feature 94, 95, 96, 97, 98, 99: n = A,T,C or G
gactggaagagcactgttataaacaacgcactccaatcttcccaagttggaggctcatcgttcctattcaggcagatgttatcgaggtccgacnnnnnnataacgaacgtaaaacgcgacgctaccgatcggatacgcatgaggct

SEQ ID NO: 3289 - DNA, 146 bp, Artificial Sequence
  Bisulfite Padlock Probe
  misc_feature 96, 97, 98, 99, 100, 101: n = A,T,C or G
gactggaagagcactgttataaacatactactataataaaaacccttgttggaggctcatcgttcctattcaggcagatgttatcgaggtccgacnnnnnnccataaaaacaccgtaaaactcaccgatcggatacgcatgaggct

SEQ ID NO: 3290 - DNA, 146 bp, Artificial Sequence
  Bisulfite Padlock Probe
  misc_feature 93, 94, 95, 96, 97, 98: n = A,T,C or G
gactggaagagcactgttataaacccgaaacgaacaatacaaaagttggaggctcatcgttcctattcaggcagatgttatcgaggtccgacnnnnnnacaacatcccaaccttacaaaaacaatcgatcggatacgcatgaggct

SEQ ID NO: 3291 - DNA, 146 bp, Artificial Sequence
  Bisulfite Padlock Probe
  misc_feature 93, 94, 95, 96, 97, 98: n = A,T,C or G
gactggaagagcactgttataaacccgaaacgaacaatacgaaagttggaggctcatcgttcctattcaggcagatgttatcgaggtccgacnnnnnnacaacatcccaaccttacaaaaacgatcgatcggatacgcatgaggct

SEQ ID NO: 3292 - DNA, 146 bp, Artificial Sequence
  Bisulfite Padlock Probe
  misc_feature 93, 94, 95, 96, 97, 98: n = A,T,C or G
gactggaagagcactgttataaacccgcttaaaaacgcaaaaaagttggaggctcatcgttcctattcaggcagatgttatcgaggtccgacnnnnnnaattacccgaacactcaaaacaaaaaccgatcggatacgcatgaggct

SEQ ID NO: 3293 - DNA, 146 bp, Artificial Sequence
  Bisulfite Padlock Probe
  misc_feature 93, 94, 95, 96, 97, 98: n = A,T,C or G
gactggaagagcactgttataaacccgcttaaaaacgcgaaaaagttggaggctcatcgttcctattcaggcagatgttatcgaggtccgacnnnnnnaattacccgaacgctcaaaacaaaaaccgatcggatacgcatgaggct

SEQ ID NO: 3294 - DNA, 146 bp, Artificial Sequence
  Bisulfite Padlock Probe
  misc_feature 96, 97, 98, 99, 100, 101: n = A,T,C or G
gactggaagagcactgttataaacgtactactataataaaaacccttgttggaggctcatcgttcctattcaggcagatgttatcgaggtccgacnnnnnnccataaaaacaccgtaaaactcgccgatcggatacgcatgaggct

SEQ ID NO: 3295 - DNA, 146 bp, Artificial Sequence
  Bisulfite Padlock Probe
  misc_feature 96, 97, 98, 99, 100, 101: n = A,T,C or G
gactggaagagcactgttataaactaataaataaaacaccacaacccgttggaggctcatcgttcctattcaggcagatgttatcgaggtccgacnnnnnncgttttcacccaaccaacctacctcgatcggatacgcatgaggct

SEQ ID NO: 3296 - DNA, 146 bp, Artificial Sequence
  Bisulfite Padlock Probe
  misc_feature 96, 97, 98, 99, 100, 101: n = A,T,C or G
gactggaagagcactgttataaactaataaataaaacaccgcaacccgttggaggctcatcgttcctattcaggcagatgttatcgaggtccgacnnnnnncgttttcgcccaaccaacctacctcgatcggatacgcatgaggct

SEQ ID NO: 3297 - DNA, 146 bp, Artificial Sequence
  Bisulfite Padlock Probe
  misc_feature 92, 93, 94, 95, 96, 97: n = A,T,C or G
gactggaagagcactgttataaacttaaactaataacgcatacgttggaggctcatcgttcctattcaggcagatgttatcgaggtccgacnnnnnncctcgatatccgcgcataaatcctaaaaagatcggatacgcatgaggct

SEQ ID NO: 3298 - DNA, 146 bp, Artificial Sequence
  Bisulfite Padlock Probe
  misc_feature 92, 93, 94, 95, 96, 97: n = A,T,C or G
gactggaagagcactgttataaacttaaactaataacgcgtacgttggaggctcatcgttcctattcaggcagatgttatcgaggtccgacnnnnnncctcgatatccgcgcgtaaatcctaaaaagatcggatacgcatgaggct

SEQ ID NO: 3299 - DNA, 146 bp, Artificial Sequence
  Bisulfite Padlock Probe
  misc_feature 94, 95, 96, 97, 98, 99: n = A,T,C or G
gactggaagagcactgttataaactttataaaatttctaacaaccgttggaggctcatcgttcctattcaggcagatgttatcgaggtccgacnnnnnnaaaacctcgttacccaaaccaataaaagatcggatacgcatgaggct

SEQ ID NO: 3300 - DNA, 146 bp, Artificial Sequence
  Bisulfite Padlock Probe
  misc_feature 94, 95, 96, 97, 98, 99: n = A,T,C or G
gactggaagagcactgttataaactttataaaatttctaacaaccgttggaggctcatcgttcctattcaggcagatgttatcgaggtccgacnnnnnnaaaacctcgttacccgaaccaataaaagatcggatacgcatgaggct

SEQ ID NO: 3301 - DNA, 146 bp, Artificial Sequence
  Bisulfite Padlock Probe
  misc_feature 93, 94, 95, 96, 97, 98: n = A,T,C or G
gactggaagagcactgttataaatataaacgcaaccacccaaacgttggaggctcatcgttcctattcaggcagatgttatcgaggtccgacnnnnnnaaaaacgcacaactcgactaacaataacgatcggatacgcatgaggct

SEQ ID NO: 3302 - DNA, 146 bp, Artificial Sequence
  Bisulfite Padlock Probe
  misc_feature 93, 94, 95, 96, 97, 98: n = A,T,C or G
gactggaagagcactgttataaatataaacgcaaccgcccaaacgttggaggctcatcgttcctattcaggcagatgttatcgaggtccgacnnnnnnaaaaacgcacaactcgactaacgataacgatcggatacgcatgaggct

SEQ ID NO: 3303 - DNA, 146 bp, Artificial Sequence
  Bisulfite Padlock Probe
  misc_feature 93, 94, 95, 96, 97, 98: n = A,T,C or G
gactggaagagcactgttataaatcacgttatacaaccaaactcgttggaggctcatcgttcctattcaggcagatgttatcgaggtccgacnnnnnncgtaccgttcacgataacattacaaaccgatcggatacgcatgaggct

SEQ ID NO: 3304 - DNA, 146 bp, Artificial Sequence
  Bisulfite Padlock Probe
  misc_feature 93, 94, 95, 96, 97, 98: n = A,T,C or G
gactggaagagcactgttataaatcacgttatacaaccgaactcgttggaggctcatcgttcctattcaggcagatgttatcgaggtccgacnnnnnncgtaccgttcacgataacgttacaaaccgatcggatacgcatgaggct

SEQ ID NO: 3305 - DNA, 146 bp, Artificial Sequence
  Bisulfite Padlock Probe
  misc_feature 93, 94, 95, 96, 97, 98: n = A,T,C or G
gactggaagagcactgttataaatcccaatcaaaactaaaccccgttggaggctcatcgttcctattcaggcagatgttatcgaggtccgacnnnnnnaacaacgcgaataacgataacaacccccgatcggatacgcatgaggct

SEQ ID NO: 3306 - DNA, 146 bp, Artificial Sequence
  Bisulfite Padlock Probe
  misc_feature 93, 94, 95, 96, 97, 98: n = A,T,C or G
gactggaagagcactgttataaatcccgatcaaaactaaaccccgttggaggctcatcgttcctattcaggcagatgttatcgaggtccgacnnnnnnaacaacgcgaataacgataacgacccccgatcggatacgcatgaggct

SEQ ID NO: 3307 - DNA, 146 bp, Artificial Sequence
  Bisulfite Padlock Probe
  misc_feature 92, 93, 94, 95, 96, 97: n = A,T,C or G
gactggaagagcactgttataaatcctaaaacaaaaataaaaagttggaggctcatcgttcctattcaggcagatgttatcgaggtccgacnnnnnncactaccacctctccctaaccctctaaccgatcggatacgcatgaggct

SEQ ID NO: 3308 - DNA, 146 bp, Artificial Sequence
  Bisulfite Padlock Probe
  misc_feature 92, 93, 94, 95, 96, 97: n = A,T,C or G
gactggaagagcactgttataaatcctaaaacgaaaataaaaagttggaggctcatcgttcctattcaggcagatgttatcgaggtccgacnnnnnncactaccacctctccctaaccctctaaccgatcggatacgcatgaggct

SEQ ID NO: 3309 - DNA, 146 bp, Artificial Sequence
  Bisulfite Padlock Probe
  misc_feature 94, 95, 96, 97, 98, 99: n = A,T,C or G
gactggaagagcactgttataaatcgaaaacgcttatacctcaacgttggaggctcatcgttcctattcaggcagatgttatcgaggtccgacnnnnnnaaaatcgaaaactaaaaactcaaaccagatcggatacgcatgaggct

SEQ ID NO: 3310 - DNA, 146 bp, Artificial Sequence
  Bisulfite Padlock Probe
  misc_feature 94, 95, 96, 97, 98, 99: n = A,T,C or G
gactggaagagcactgttataaatcgaaaacgcttatacctcgacgttggaggctcatcgttcctattcaggcagatgttatcgaggtccgacnnnnnnaaaatcgaaaactaaaaactcgaaccagatcggatacgcatgaggct

SEQ ID NO: 3311 - DNA, 146 bp, Artificial Sequence
  Bisulfite Padlock Probe
  misc_feature 94, 95, 96, 97, 98, 99: n = A,T,C or G
gactggaagagcactgttataacaacaacccctccaaaccaaaacgttggaggctcatcgttcctattcaggcagatgttatcgaggtccgacnnnnnnaaaccgatatccccgataacgcaatacgatcggatacgcatgaggct

SEQ ID NO: 3312 - DNA, 146 bp, Artificial Sequence
  Bisulfite Padlock Probe
  misc_feature 94, 95, 96, 97, 98, 99: n = A,T,C or G
gactggaagagcactgttataacaacaacccctccaaaccaaaacgttggaggctcatcgttcctattcaggcagatgttatcgaggtccgacnnnnnnaaaccgatatccccgataacgcgatacgatcggatacgcatgaggct

SEQ ID NO: 3313 - DNA, 146 bp, Artificial Sequence
  Bisulfite Padlock Probe
  misc_feature 92, 93, 94, 95, 96, 97: n = A,T,C or G
gactggaagagcactgttataaccaaaaattaaaaacaaaaaagttggaggctcatcgttcctattcaggcagatgttatcgaggtccgacnnnnnncccccaaaataactatataaaatctcttcgatcggatacgcatgaggct

SEQ ID NO: 3314 - DNA, 146 bp, Artificial Sequence
  Bisulfite Padlock Probe
  misc_feature 92, 93, 94, 95, 96, 97: n = A,T,C or G
gactggaagagcactgttataaccaaaaattaaaaacgaaaaagttggaggctcatcgttcctattcaggcagatgttatcgaggtccgacnnnnnncccccaaaataactatataaaatctcttcgatcggatacgcatgaggct

SEQ ID NO: 3315 - DNA, 146 bp, Artificial Sequence
  Bisulfite Padlock Probe
  misc_feature 92, 93, 94, 95, 96, 97: n = A,T,C or G
gactggaagagcactgttataaccaaaacaaatctaatcacaagttggaggctcatcgttcctattcaggcagatgttatcgaggtccgacnnnnnnacgaaaccaacaatcaacatcctaaaaacgatcggatacgcatgaggct

SEQ ID NO: 3316 - DNA, 146 bp, Artificial Sequence
  Bisulfite Padlock Probe
  misc_feature 92, 93, 94, 95, 96, 97: n = A,T,C or G
gactggaagagcactgttataaccacaacccaatactaaaactgttggaggctcatcgttcctattcaggcagatgttatcgaggtccgacnnnnnntaaaatttcctctcctcctaaaataaatcgatcggatacgcatgaggct

SEQ ID NO: 3317 - DNA, 146 bp, Artificial Sequence
  Bisulfite Padlock Probe
  misc_feature 92, 93, 94, 95, 96, 97: n = A,T,C or G
gactggaagagcactgttataacccgcccttcccaacttactcgttggaggctcatcgttcctattcaggcagatgttatcgaggtccgacnnnnnnttaaatacataaaaactaaaccaacaaacgatcggatacgcatgaggct

SEQ ID NO: 3318 - DNA, 146 bp, Artificial Sequence
  Bisulfite Padlock Probe
  misc_feature 92, 93, 94, 95, 96, 97: n = A,T,C or G
gactggaagagcactgttataacccgcccttcccgacttactcgttggaggctcatcgttcctattcaggcagatgttatcgaggtccgacnnnnnnttaaatacgtaaaaactaaaccaacaaacgatcggatacgcatgaggct

SEQ ID NO: 3319 - DNA, 146 bp, Artificial Sequence
  Bisulfite Padlock Probe
  misc_feature 93, 94, 95, 96, 97, 98: n = A,T,C or G
gactggaagagcactgttataaccctaaaacttcaaatccaaaagttggaggctcatcgttcctattcaggcagatgttatcgaggtccgacnnnnnnattcccaacatctaaactcaaaccactcgatcggatacgcatgaggct

SEQ ID NO: 3320 - DNA, 146 bp, Artificial Sequence
  Bisulfite Padlock Probe
  misc_feature 93, 94, 95, 96, 97, 98: n = A,T,C or G
gactggaagagcactgttataaccctaaaacttcaaatccaaaagttggaggctcatcgttcctattcaggcagatgttatcgaggtccgacnnnnnnattcccaacatctaaactcgaaccactcgatcggatacgcatgaggct

SEQ ID NO: 3321 - DNA, 146 bp, Artificial Sequence
  Bisulfite Padlock Probe
  misc_feature 92, 93, 94, 95, 96, 97: n = A,T,C or G
gactggaagagcactgttataaccgaaacaaatctaatcacaagttggaggctcatcgttcctattcaggcagatgttatcgaggtccgacnnnnnnacgaaaccgacaatcaacatcctaaaaacgatcggatacgcatgaggct

SEQ ID NO: 3322 - DNA, 146 bp, Artificial Sequence
  Bisulfite Padlock Probe
  misc_feature 92, 93, 94, 95, 96, 97: n = A,T,C or G
gactggaagagcactgttataaccgcaacccaatactaaaactgttggaggctcatcgttcctattcaggcagatgttatcgaggtccgacnnnnnntaaaatttcctctcctcctaaaataaatcgatcggatacgcatgaggct

SEQ ID NO: 3323 - DNA, 146 bp, Artificial Sequence
  Bisulfite Padlock Probe
  misc_feature 92, 93, 94, 95, 96, 97: n = A,T,C or G
gactggaagagcactgttataacctaacctcaaaatcaacaacgttggaggctcatcgttcctattcaggcagatgttatcgaggtccgacnnnnnnaaaaacttacaataatcccaaaacccctcgatcggatacgcatgaggct

SEQ ID NO: 3324 - DNA, 146 bp, Artificial Sequence
  Bisulfite Padlock Probe
  misc_feature 92, 93, 94, 95, 96, 97: n = A,T,C or G
gactggaagagcactgttataacctaacctcgaaatcaacaacgttggaggctcatcgttcctattcaggcagatgttatcgaggtccgacnnnnnnaaaaacttacaataatcccgaaacccctcgatcggatacgcatgaggct

SEQ ID NO: 3325 - DNA, 146 bp, Artificial Sequence
  Bisulfite Padlock Probe
  misc_feature 93, 94, 95, 96, 97, 98: n = A,T,C or G
gactggaagagcactgttataacctttttattaaaaaccaaactgttggaggctcatcgttcctattcaggcagatgttatcgaggtccgacnnnnnnaacgacacaaaacataaatataacccccgatcggatacgcatgaggct

SEQ ID NO: 3326 - DNA, 146 bp, Artificial Sequence
  Bisulfite Padlock Probe
  misc_feature 93, 94, 95, 96, 97, 98: n = A,T,C or G
gactggaagagcactgttataacctttttattaaaaaccaaactgttggaggctcatcgttcctattcaggcagatgttatcgaggtccgacnnnnnnaacgacacaaaacgtaaatataacccccgatcggatacgcatgaggct

SEQ ID NO: 3327 - DNA, 146 bp, Artificial Sequence
  Bisulfite Padlock Probe
  misc_feature 92, 93, 94, 95, 96, 97: n = A,T,C or G
gactggaagagcactgttataacgacgccaactactccgacacgttggaggctcatcgttcctattcaggcagatgttatcgaggtccgacnnnnnnaaacccgcaccttaataaactccaaactagatcggatacgcatgaggct

SEQ ID NO: 3328 - DNA, 146 bp, Artificial Sequence
  Bisulfite Padlock Probe
  misc_feature 92, 93, 94, 95, 96, 97: n = A,T,C or G
gactggaagagcactgttataacgacgccaactactccgacgcgttggaggctcatcgttcctattcaggcagatgttatcgaggtccgacnnnnnnaaacccgcgccttaataaactccaaactagatcggatacgcatgaggct

SEQ ID NO: 3329 - DNA, 146 bp, Artificial Sequence
  Bisulfite Padlock Probe
  misc_feature 95, 96, 97, 98, 99, 100: n = A,T,C or G
gactggaagagcactgttataactcaaattaaaaacgaccccaaaagttggaggctcatcgttcctattcaggcagatgttatcgaggtccgacnnnnnncatttaccaacacaaaaatacctcccgatcggatacgcatgaggct

SEQ ID NO: 3330 - DNA, 146 bp, Artificial Sequence
  Bisulfite Padlock Probe
  misc_feature 95, 96, 97, 98, 99, 100: n = A,T,C or G
gactggaagagcactgttataactcaaattaaaaacgaccccgaaagttggaggctcatcgttcctattcaggcagatgttatcgaggtccgacnnnnnncatttaccaacacgaaaatacctcccgatcggatacgcatgaggct

SEQ ID NO: 3331 - DNA, 146 bp, Artificial Sequence
  Bisulfite Padlock Probe
  misc_feature 92, 93, 94, 95, 96, 97: n = A,T,C or G
gactggaagagcactgttataactctaaattaacaaactaaacgttggaggctcatcgttcctattcaggcagatgttatcgaggtccgacnnnnnncaataaaactaaacatcccctaccacatcgatcggatacgcatgaggct

SEQ ID NO: 3332 - DNA, 146 bp, Artificial Sequence
  Bisulfite Padlock Probe
  misc_feature 92, 93, 94, 95, 96, 97: n = A,T,C or G
gactggaagagcactgttataactctaaattaacgaactaaacgttggaggctcatcgttcctattcaggcagatgttatcgaggtccgacnnnnnncaataaaactaaacatcccctaccacgtcgatcggatacgcatgaggct

SEQ ID NO: 3333 - DNA, 146 bp, Artificial Sequence
  Bisulfite Padlock Probe
  misc_feature 95, 96, 97, 98, 99, 100: n = A,T,C or G
gactggaagagcactgttataactttttctttctttcctctctaaagttggaggctcatcgttcctattcaggcagatgttatcgaggtccgacnnnnnnactacacttacttatatcacaactacgatcggatacgcatgaggct

SEQ ID NO: 3334 - DNA, 146 bp, Artificial Sequence
  Bisulfite Padlock Probe
  misc_feature 92, 93, 94, 95, 96, 97: n = A,T,C or G
gactggaagagcactgttataataaaaacctcatatacctccagttggaggctcatcgttcctattcaggcagatgttatcgaggtccgacnnnnnncaacacaatactcaaatatcccctacatcgatcggatacgcatgaggct

SEQ ID NO: 3335 - DNA, 146 bp, Artificial Sequence
  Bisulfite Padlock Probe
  misc_feature 93, 94, 95, 96, 97, 98: n = A,T,C or G
gactggaagagcactgttataataacactaaacataatattaacgttggaggctcatcgttcctattcaggcagatgttatcgaggtccgacnnnnnntccctaaaacaatcaaaactcaaaaaccgatcggatacgcatgaggct

SEQ ID NO: 3336 - DNA, 146 bp, Artificial Sequence
  Bisulfite Padlock Probe
  misc_feature 92, 93, 94, 95, 96, 97: n = A,T,C or G
gactggaagagcactgttataataaccaaattaaaaacaacacgttggaggctcatcgttcctattcaggcagatgttatcgaggtccgacnnnnnnaaacctaaacccaaaaacaacaaaaccccgatcggatacgcatgaggct

SEQ ID NO: 3337 - DNA, 146 bp, Artificial Sequence
  Bisulfite Padlock Probe
  misc_feature 92, 93, 94, 95, 96, 97: n = A,T,C or G
gactggaagagcactgttataataaccaaattaaaaacaacgcgttggaggctcatcgttcctattcaggcagatgttatcgaggtccgacnnnnnnaaacctaaacccaaaaacaacgaaaccccgatcggatacgcatgaggct

SEQ ID NO: 3338 - DNA, 146 bp, Artificial Sequence
  Bisulfite Padlock Probe
  misc_feature 93, 94, 95, 96, 97, 98: n = A,T,C or G
gactggaagagcactgttataataaccacaaacaaaccaacatcgttggaggctcatcgttcctattcaggcagatgttatcgaggtccgacnnnnnncaaaccgaaaaatccctcccctcaaacagatcggatacgcatgaggct

SEQ ID NO: 3339 - DNA, 146 bp, Artificial Sequence; identical to SEQ ID NO: 3338
  Bisulfite Padlock Probe
  misc_feature 93, 94, 95, 96, 97, 98: n = A,T,C or G

SEQ ID NO: 3340 - DNA, 146 bp, Artificial Sequence; identical to SEQ ID NO: 3338
  Bisulfite Padlock Probe
  misc_feature 93, 94, 95, 96, 97, 98: n = A,T,C or G

SEQ ID NO: 3341 - DNA, 146 bp, Artificial Sequence
  Bisulfite Padlock Probe
  misc_feature 93, 94, 95, 96, 97, 98: n = A,T,C or G
gactggaagagcactgttataataaccacgaacaaaccaacatcgttggaggctcatcgttcctattcaggcagatgttatcgaggtccgacnnnnnncaaaccgaaaaatccctcccctcgaacagatcggatacgcatgaggct

SEQ ID NO: 3342 - DNA, 146 bp, Artificial Sequence; identical to SEQ ID NO: 3341
  Bisulfite Padlock Probe
  misc_feature 93, 94, 95, 96, 97, 98: n = A,T,C or G

SEQ ID NO: 3343 - DNA, 146 bp, Artificial Sequence; identical to SEQ ID NO: 3341
  Bisulfite Padlock Probe
  misc_feature 93, 94, 95, 96, 97, 98: n = A,T,C or G

SEQ ID NO: 3344 - DNA, 146 bp, Artificial Sequence
  Bisulfite Padlock Probe
  misc_feature 93, 94, 95, 96, 97, 98: n = A,T,C or G
gactggaagagcactgttataataacgctaaacataatattaacgttggaggctcatcgttcctattcaggcagatgttatcgaggtccgacnnnnnntccctaaaacgatcaaaactcaaaaaccgatcggatacgcatgaggct

SEQ ID NO: 3345 - DNA, 146 bp, Artificial Sequence
  Bisulfite Padlock Probe
  misc_feature 96, 97, 98, 99, 100, 101: n = A,T,C or G
gactggaagagcactgttataataccaaaaactaattaccataaaaagttggaggctcatcgttcctattcaggcagatgttatcgaggtccgacnnnnnnatattcaaccccctcccaccaaaccgatcggatacgcatgaggct

SEQ ID NO: 3346 - DNA, 146 bp, Artificial Sequence
  Bisulfite Padlock Probe
  misc_feature 96, 97, 98, 99, 100, 101: n = A,T,C or G
gactggaagagcactgttataataccgaaaactaattaccataaaaagttggaggctcatcgttcctattcaggcagatgttatcgaggtccgacnnnnnnatattcgaccccctcccaccaaaccgatcggatacgcatgaggct

SEQ ID NO: 3347 - DNA, 146 bp, Artificial Sequence
  Bisulfite Padlock Probe
  misc_feature 92, 93, 94, 95, 96, 97: n = A,T,C or G
gactggaagagcactgttataatacgctccaaaccaccaaaccgttggaggctcatcgttcctattcaggcagatgttatcgaggtccgacnnnnnnaaaactaaccgacataaaccgaccacaacgatcggatacgcatgaggct

SEQ ID NO: 3348 - DNA, 146 bp, Artificial Sequence
  Bisulfite Padlock Probe
  misc_feature 92, 93, 94, 95, 96, 97: n = A,T,C or G
gactggaagagcactgttataatacgctccaaaccgccaaaccgttggaggctcatcgttcctattcaggcagatgttatcgaggtccgacnnnnnnaaaactaaccgacataaaccgaccgcaacgatcggatacgcatgaggct

SEQ ID NO: 3349 - DNA, 146 bp, Artificial Sequence
  Bisulfite Padlock Probe
  misc_feature 96, 97, 98, 99, 100, 101: n = A,T,C or G
gactggaagagcactgttataatactaaccaacttataacaataaccgttggaggctcatcgttcctattcaggcagatgttatcgaggtccgacnnnnnnaatactcgtcgaaatcgaaacactcgatcggatacgcatgaggct

SEQ ID NO: 3350 - DNA, 146 bp, Artificial Sequence
  Bisulfite Padlock Probe
  misc_feature 96, 97, 98, 99, 100, 101: n = A,T,C or G
gactggaagagcactgttataatactaaccaacttataacaataaccgttggaggctcatcgttcctattcaggcagatgttatcgaggtccgacnnnnnnaatactcgtcgaaatcgaaacgctcgatcggatacgcatgaggct

SEQ ID NO: 3351 - DNA, 146 bp, Artificial Sequence
  Bisulfite Padlock Probe
  misc_feature 92, 93, 94, 95, 96, 97: n = A,T,C or G
gactggaagagcactgttatacaaaaccttactattaatctcagttggaggctcatcgttcctattcaggcagatgttatcgaggtccgacnnnnnnaatcaactcccaactccccttaaaataaagatcggatacgcatgaggct

SEQ ID NO: 3352 - DNA, 146 bp, Artificial Sequence
  Bisulfite Padlock Probe
  misc_feature 92, 93, 94, 95, 96, 97: n = A,T,C or G
gactggaagagcactgttatacaaaaccttactattaatctcagttggaggctcatcgttcctattcaggcagatgttatcgaggtccgacnnnnnnaatcgactcccaactccccttaaaataaagatcggatacgcatgaggct

SEQ ID NO: 3353 - DNA, 146 bp, Artificial Sequence
  Bisulfite Padlock Probe
  misc_feature 95, 96, 97, 98, 99, 100: n = A,T,C or G
gactggaagagcactgttatacaactcatactactactacaacaacgttggaggctcatcgttcctattcaggcagatgttatcgaggtccgacnnnnnnaaacaaaatcaaaataatcaaaatacgatcggatacgcatgaggct

SEQ ID NO: 3354 - DNA, 146 bp, Artificial Sequence
  Bisulfite Padlock Probe
  misc_feature 95, 96, 97, 98, 99, 100: n = A,T,C or G
gactggaagagcactgttatacaactcatactactactacaacaacgttggaggctcatcgttcctattcaggcagatgttatcgaggtccgacnnnnnnaaacaaaatcaaaataatcgaaatacgatcggatacgcatgaggct

SEQ ID NO: 3355 - DNA, 146 bp, Artificial Sequence
  Bisulfite Padlock Probe
  misc_feature 92, 93, 94, 95, 96, 97: n = A,T,C or G
gactggaagagcactgttatacaatcacacaacccttcccttcgttggaggctcatcgttcctattcaggcagatgttatcgaggtccgacnnnnnncaaaactaaaaccaaaaataaccccaattgatcggatacgcatgaggct

SEQ ID NO: 3356 - DNA, 146 bp, Artificial Sequence
  Bisulfite Padlock Probe
  misc_feature 92, 93, 94, 95, 96, 97: n = A,T,C or G
gactggaagagcactgttatacaatcacacgacccttcccttcgttggaggctcatcgttcctattcaggcagatgttatcgaggtccgacnnnnnncaaaactaaaaccgaaaataaccccaattgatcggatacgcatgaggct

SEQ ID NO: 3357 - DNA, 146 bp, Artificial Sequence
  Bisulfite Padlock Probe
  misc_feature 92, 93, 94, 95, 96, 97: n = A,T,C or G
gactggaagagcactgttatacatactaataaaacaccccttcgttggaggctcatcgttcctattcaggcagatgttatcgaggtccgacnnnnnnattttattcaaatcctcattttaaaaatagatcggatacgcatgaggct

SEQ ID NO: 3358 - DNA, 146 bp, Artificial Sequence
  Bisulfite Padlock Probe
  misc_feature 92, 93, 94, 95, 96, 97: n = A,T,C or G
gactggaagagcactgttatacccaacctctaccgaaacaaccgttggaggctcatcgttcctattcaggcagatgttatcgaggtccgacnnnnnnacttccgatcgtccaaaaacctccaaaaagatcggatacgcatgaggct

SEQ ID NO: 3359 - DNA, 146 bp, Artificial Sequence
  Bisulfite Padlock Probe
  misc_feature 92, 93, 94, 95, 96, 97: n = A,T,C or G
gactggaagagcactgttatacccaacctctaccgaaacgaccgttggaggctcatcgttcctattcaggcagatgttatcgaggtccgacnnnnnnacttccgatcgtccgaaaacctccaaaaagatcggatacgcatgaggct

SEQ ID NO: 3360 - DNA, 146 bp, Artificial Sequence
  Bisulfite Padlock Probe
  misc_feature 92, 93, 94, 95, 96, 97: n = A,T,C or G
gactggaagagcactgttatacccacaatactaaccctaaatcgttggaggctcatcgttcctattcaggcagatgttatcgaggtccgacnnnnnnaaaaaccaatcgcgaataaaatcataatagatcggatacgcatgaggct

SEQ ID NO: 3361 - DNA, 146 bp, Artificial Sequence
  Bisulfite Padlock Probe
  misc_feature 92, 93, 94, 95, 96, 97: n = A,T,C or G
gactggaagagcactgttatacccacgatactaaccctaaatcgttggaggctcatcgttcctattcaggcagatgttatcgaggtccgacnnnnnnaaaaaccaatcgcgaataaaatcgtaatagatcggatacgcatgaggct

SEQ ID NO: 3362 - DNA, 146 bp, Artificial Sequence
  Bisulfite Padlock Probe
  misc_feature 92, 93, 94, 95, 96, 97: n = A,T,C or G
gactggaagagcactgttataccccctcctctcctcctaaaaagttggaggctcatcgttcctattcaggcagatgttatcgaggtccgacnnnnnnataccttcccctcatcactacacctaaccgatcggatacgcatgaggct

SEQ ID NO: 3363 - DNA, 146 bp, Artificial Sequence
  Bisulfite Padlock Probe
  misc_feature 92, 93, 94, 95, 96, 97: n = A,T,C or G
gactggaagagcactgttataccccctcctctcctcctaaaaagttggaggctcatcgttcctattcaggcagatgttatcgaggtccgacnnnnnnataccttcccctcgtcactacacctaaccgatcggatacgcatgaggct

SEQ ID NO: 3364 - DNA, 146 bp, Artificial Sequence
  Bisulfite Padlock Probe
  misc_feature 96, 97, 98, 99, 100, 101: n = A,T,C or G
gactggaagagcactgttataccctccaaccaaaaccaaaaactaacgttggaggctcatcgttcctattcaggcagatgttatcgaggtccgacnnnnnncacacacactaaacaaaattaaaaagatcggatacgcatgaggct

SEQ ID NO: 3365 - DNA, 146 bp, Artificial Sequence
  Bisulfite Padlock Probe
  misc_feature 96, 97, 98, 99, 100, 101: n = A,T,C or G
gactggaagagcactgttataccctccaaccgaaaccaaaaactaacgttggaggctcatcgttcctattcaggcagatgttatcgaggtccgacnnnnnncacacacgctaaacaaaattaaaaagatcggatacgcatgaggct

SEQ ID NO: 3366 - DNA, 146 bp, Artificial Sequence
  Bisulfite Padlock Probe
  misc_feature 96, 97, 98, 99, 100, 101: n = A,T,C or G
gactggaagagcactgttataccctctaccaaacaactctaaaaaccgttggaggctcatcgttcctattcaggcagatgttatcgaggtccgacnnnnnnaacaaaaacaaatctcaaataaaaagatcggatacgcatgaggct

SEQ ID NO: 3367 - DNA, 146 bp, Artificial Sequence
  Bisulfite Padlock Probe
  misc_feature 96, 97, 98, 99, 100, 101: n = A,T,C or G
gactggaagagcactgttatacgaaaacaaaaacacttttcaatacagttggaggctcatcgttcctattcaggcagatgttatcgaggtccgacnnnnnnatccccttcctacaccctaccccacgatcggatacgcatgaggct

SEQ ID NO: 3368 - DNA, 146 bp, Artificial Sequence
  Bisulfite Padlock Probe
  misc_feature 96, 97, 98, 99, 100, 101: n = A,T,C or G
gactggaagagcactgttatacgaaaacgaaaacacttttcaatacagttggaggctcatcgttcctattcaggcagatgttatcgaggtccgacnnnnnnatccccttcctacaccctaccccacgatcggatacgcatgaggct

SEQ ID NO: 3369 - DNA, 146 bp, Artificial Sequence
  Bisulfite Padlock Probe
  misc_feature 95, 96, 97, 98, 99, 100: n = A,T,C or G
gactggaagagcactgttatacgaaaataaacaaaacaaataaaaagttggaggctcatcgttcctattcaggcagatgttatcgaggtccgacnnnnnnatctcacattaattaaccaaaacccagatcggatacgcatgaggct

SEQ ID NO: 3370 - DNA, 146 bp, Artificial Sequence
  Bisulfite Padlock Probe
  misc_feature 95, 96, 97, 98, 99, 100: n = A,T,C or G
gactggaagagcactgttatacgaaaataaacaaaacgaataaaaagttggaggctcatcgttcctattcaggcagatgttatcgaggtccgacnnnnnnatctcacgttaattaaccaaaacccagatcggatacgcatgaggct

SEQ ID NO: 3371 - DNA, 146 bp, Artificial Sequence
  Bisulfite Padlock Probe
  misc_feature 94, 95, 96, 97, 98, 99: n = A,T,C or G
gactggaagagcactgttatacgaaacgccgccaaaatcaaactagttggaggctcatcgttcctattcaggcagatgttatcgaggtccgacnnnnnnaaatcaattccaaaaccaaaccaaaaagatcggatacgcatgaggct

SEQ ID NO: 3372 - DNA, 146 bp, Artificial Sequence
  Bisulfite Padlock Probe
  misc_feature 94, 95, 96, 97, 98, 99: n = A,T,C or G
gactggaagagcactgttatacgaaacgccgccgaaatcaaactagttggaggctcatcgttcctattcaggcagatgttatcgaggtccgacnnnnnnaaatcaattccaaaaccaaaccaaaaagatcggatacgcatgaggct

SEQ ID NO: 3373 - DNA, 146 bp, Artificial Sequence
  Bisulfite Padlock Probe
  misc_feature 92, 93, 94, 95, 96, 97: n = A,T,C or G
gactggaagagcactgttatacgaatacgaccgcgaacacccagttggaggctcatcgttcctattcaggcagatgttatcgaggtccgacnnnnnnaaaaacccgataaacctacgcacaaaaacgatcggatacgcatgaggct

SEQ ID NO: 3374 - DNA, 146 bp, Artificial Sequence
  Bisulfite Padlock Probe
  misc_feature 92, 93, 94, 95, 96, 97: n = A,T,C or G
gactggaagagcactgttatacgaatacgaccgcgaacacccggttggaggctcatcgttcctattcaggcagatgttatcgaggtccgacnnnnnnaaaaacccgataaacctacgcgcaaaaacgatcggatacgcatgaggct

SEQ ID NO: 3375 - DNA, 146 bp, Artificial Sequence
  Bisulfite Padlock Probe
  misc_feature 96, 97, 98, 99, 100, 101: n = A,T,C or G
gactggaagagcactgttatacgataaataaccctacgcaacataacgttggaggctcatcgttcctattcaggcagatgttatcgaggtccgacnnnnnnaaaaacacgaaacgcaacgaaacacgatcggatacgcatgaggct

SEQ ID NO: 3376 - DNA, 146 bp, Artificial Sequence
  Bisulfite Padlock Probe
  misc_feature 96, 97, 98, 99, 100, 101: n = A,T,C or G
gactggaagagcactgttatacgataaataaccctacgcaacgtaacgttggaggctcatcgttcctattcaggcagatgttatcgaggtccgacnnnnnnaaaaacacgaaacgcaacgaaacgcgatcggatacgcatgaggct

SEQ ID NO: 3377 - DNA, 146 bp, Artificial Sequence
  Bisulfite Padlock Probe
  misc_feature 92, 93, 94, 95, 96, 97: n = A,T,C or G
gactggaagagcactgttatacgcaaaacctaacgccttcgcagttggaggctcatcgttcctattcaggcagatgttatcgaggtccgacnnnnnnaatatcgtaaacgaaaaaccacaaaatacgatcggatacgcatgaggct

SEQ ID NO: 3378 - DNA, 146 bp, Artificial Sequence
  Bisulfite Padlock Probe
  misc_feature 92, 93, 94, 95, 96, 97: n = A,T,C or G
gactggaagagcactgttatacgcaaaacctaacgccttcgcggttggaggctcatcgttcctattcaggcagatgttatcgaggtccgacnnnnnnaatatcgtaaacgaaaaaccgcaaaatacgatcggatacgcatgaggct

SEQ ID NO: 3379 - DNA, 146 bp, Artificial Sequence
  Bisulfite Padlock Probe
  misc_feature 92, 93, 94, 95, 96, 97: n = A,T,C or G
gactggaagagcactgttatacgccgaaactactctaccataagttggaggctcatcgttcctattcaggcagatgttatcgaggtccgacnnnnnncaataaccaatcctcaaaattctccaaaagatcggatacgcatgaggct

SEQ ID NO: 3380 - DNA, 146 bp, Artificial Sequence
  Bisulfite Padlock Probe
  misc_feature 92, 93, 94, 95, 96, 97: n = A,T,C or G
gactggaagagcactgttatacgccgaaactactctaccgtaagttggaggctcatcgttcctattcaggcagatgttatcgaggtccgacnnnnnncaataaccgatcctcaaaattctccaaaagatcggatacgcatgaggct

SEQ ID NO: 3381 - DNA, 146 bp, Artificial Sequence
  Bisulfite Padlock Probe
  misc_feature 92, 93, 94, 95, 96, 97: n = A,T,C or G
gactggaagagcactgttatacgtactaataaaacaccccttcgttggaggctcatcgttcctattcaggcagatgttatcgaggtccgacnnnnnnattttattcaaatcctcattttaaaaatagatcggatacgcatgaggct

SEQ ID NO: 3382 - DNA, 146 bp, Artificial Sequence
  Bisulfite Padlock Probe
  misc_feature 95, 96, 97, 98, 99, 100: n = A,T,C or G
gactggaagagcactgttatactaaaatctaaaacttccccaaccagttggaggctcatcgttcctattcaggcagatgttatcgaggtccgacnnnnnnaatacaatctaccaaactaaattcccgatcggatacgcatgaggct

SEQ ID NO: 3383 - DNA, 146 bp, Artificial Sequence
  Bisulfite Padlock Probe
  misc_feature 95, 96, 97, 98, 99, 100: n = A,T,C or G
gactggaagagcactgttatactaaaatctaaaacttccccaaccagttggaggctcatcgttcctattcaggcagatgttatcgaggtccgacnnnnnnaatacaatctaccgaactaaattcccgatcggatacgcatgaggct

SEQ ID NO: 3384 - DNA, 146 bp, Artificial Sequence
  Bisulfite Padlock Probe
  misc_feature 96, 97, 98, 99, 100, 101: n = A,T,C or G
gactggaagagcactgttatactaaattctatacctaccccgcatacgttggaggctcatcgttcctattcaggcagatgttatcgaggtccgacnnnnnnccaaccaatcaaaacgcaatataccgatcggatacgcatgaggct

SEQ ID NO: 3385 - DNA, 146 bp, Artificial Sequence
  Bisulfite Padlock Probe
  misc_feature 96, 97, 98, 99, 100, 101: n = A,T,C or G
gactggaagagcactgttatactaaattctatacctaccccgcgtacgttggaggctcatcgttcctattcaggcagatgttatcgaggtccgacnnnnnnccaaccaatcaaaacgcgatataccgatcggatacgcatgaggct

SEQ ID NO: 3386 - DNA, 146 bp, Artificial Sequence
  Bisulfite Padlock Probe
  misc_feature 96, 97, 98, 99, 100, 101: n = A,T,C or G
gactggaagagcactgttatactaataaccgcgaacctcataatctcgttggaggctcatcgttcctattcaggcagatgttatcgaggtccgacnnnnnnccaaaactccgtacgcttcgaccaagatcggatacgcatgaggct

SEQ ID NO: 3387 - DNA, 146 bp, Artificial Sequence
  Bisulfite Padlock Probe
  misc_feature 96, 97, 98, 99, 100, 101: n = A,T,C or G
gactggaagagcactgttatactaataaccgcgaacctcgtaatctcgttggaggctcatcgttcctattcaggcagatgttatcgaggtccgacnnnnnnccaaaactccgtacgcttcgaccgagatcggatacgcatgaggct

SEQ ID NO: 3388 - DNA, 146 bp, Artificial Sequence
  Bisulfite Padlock Probe
  misc_feature 93, 94, 95, 96, 97, 98: n = A,T,C or G
gactggaagagcactgttatactccaaatcttaacctacaaaacgttggaggctcatcgttcctattcaggcagatgttatcgaggtccgacnnnnnnactataatctacacaaaaactaataatagatcggatacgcatgaggct

SEQ ID NO: 3389 - DNA, 146 bp, Artificial Sequence
  Bisulfite Padlock Probe
  misc_feature 93, 94, 95, 96, 97, 98: n = A,T,C or G
gactggaagagcactgttatactccgaatcttaacctacaaaacgttggaggctcatcgttcctattcaggcagatgttatcgaggtccgacnnnnnnactataatctacacaaaaactaataatagatcggatacgcatgaggct

SEQ ID NO: 3390 - DNA, 146 bp, Artificial Sequence
  Bisulfite Padlock Probe
  misc_feature 95, 96, 97, 98, 99, 100: n = A,T,C or G
gactggaagagcactgttatactctcctatacctcaaacctttcccgttggaggctcatcgttcctattcaggcagatgttatcgaggtccgacnnnnnnctacccccttcccgaacaccataaacgatcggatacgcatgaggct

SEQ ID NO: 3391 - DNA, 146 bp, Artificial Sequence
  Bisulfite Padlock Probe
  misc_feature 95, 96, 97, 98, 99, 100: n = A,T,C or G
gactggaagagcactgttatactctcctatacctcgaacctttcccgttggaggctcatcgttcctattcaggcagatgttatcgaggtccgacnnnnnnctacccccttcccgaacaccgtaaacgatcggatacgcatgaggct

SEQ ID NO: 3392 - DNA, 146 bp, Artificial Sequence
  Bisulfite Padlock Probe
  misc_feature 93, 94, 95, 96, 97, 98: n = A,T,C or G
gactggaagagcactgttatataaaaacaaaaacaactacaaccgttggaggctcatcgttcctattcaggcagatgttatcgaggtccgacnnnnnncaaactaacgaaaaccaaaaactatatcgatcggatacgcatgaggct

SEQ ID NO: 3393 - DNA, 146 bp, Artificial Sequence
  Bisulfite Padlock Probe
  misc_feature 93, 94, 95, 96, 97, 98: n = A,T,C or G
gactggaagagcactgttatataaaaacaaaaacaactacaaccgttggaggctcatcgttcctattcaggcagatgttatcgaggtccgacnnnnnncaaactaacgaaaaccgaaaactatatcgatcggatacgcatgaggct

SEQ ID NO: 3394 - DNA, 146 bp, Artificial Sequence
  Bisulfite Padlock Probe
  misc_feature 92, 93, 94, 95, 96, 97: n = A,T,C or G
gactggaagagcactgttatataaaacaaattcacaactcctcgttggaggctcatcgttcctattcaggcagatgttatcgaggtccgacnnnnnnacaacaacaaaaacccaaaaccaaaaatagatcggatacgcatgaggct

SEQ ID NO: 3395 - DNA, 146 bp, Artificial Sequence
  Bisulfite Padlock Probe
  misc_feature 92, 93, 94, 95, 96, 97: n = A,T,C or G
gactggaagagcactgttatataaaacgaattcacaactcctcgttggaggctcatcgttcctattcaggcagatgttatcgaggtccgacnnnnnnacaacaacaaaaacccaaaaccaaaaatagatcggatacgcatgaggct

SEQ ID NO: 3396 - DNA, 146 bp, Artificial Sequence
  Bisulfite Padlock Probe
  misc_feature 92, 93, 94, 95, 96, 97: n = A,T,C or G
gactggaagagcactgttatataaacaaaaacgctacaaaaacgttggaggctcatcgttcctattcaggcagatgttatcgaggtccgacnnnnnnaaaacccaacaaaaacttaacaccctattgatcggatacgcatgaggct

SEQ ID NO: 3397 - DNA, 146 bp, Artificial Sequence
  Bisulfite Padlock Probe
  misc_feature 92, 93, 94, 95, 96, 97: n = A,T,C or G
gactggaagagcactgttatataaacaaaaacgctacgaaaacgttggaggctcatcgttcctattcaggcagatgttatcgaggtccgacnnnnnnaaaacccaacaaaaacttaacgccctattgatcggatacgcatgaggct

SEQ ID NO: 3398 - DNA, 146 bp, Artificial Sequence
  Bisulfite Padlock Probe
  misc_feature 94, 95, 96, 97, 98, 99: n = A,T,C or G
gactggaagagcactgttatataaccttaaacaaatatccaaatagttggaggctcatcgttcctattcaggcagatgttatcgaggtccgacnnnnnnaaaaaccctaaaattcgctttacaatagatcggatacgcatgaggct

SEQ ID NO: 3399 - DNA, 146 bp, Artificial Sequence
  Bisulfite Padlock Probe
  misc_feature 94, 95, 96, 97, 98, 99: n = A,T,C or G
gactggaagagcactgttatataaccttaaacaaatatccaaatagttggaggctcatcgttcctattcaggcagatgttatcgaggtccgacnnnnnnaaaaaccctaaaattcgctttacgatagatcggatacgcatgaggct

SEQ ID NO: 3400 - DNA, 146 bp, Artificial Sequence
  Bisulfite Padlock Probe
  misc_feature 92, 93, 94, 95, 96, 97: n = A,T,C or G
gactggaagagcactgttatatacgatacgcaacgcaaacaacgttggaggctcatcgttcctattcaggcagatgttatcgaggtccgacnnnnnnaactcgtcctcaaccaaataaaacaacaagatcggatacgcatgaggct

SEQ ID NO: 3401 - DNA, 146 bp, Artificial Sequence
  Bisulfite Padlock Probe
  misc_feature 92, 93, 94, 95, 96, 97: n = A,T,C or G
gactggaagagcactgttatatacgatacgcaacgcgaacaacgttggaggctcatcgttcctattcaggcagatgttatcgaggtccgacnnnnnnaactcgtcctcgaccaaataaaacaacaagatcggatacgcatgaggct

SEQ ID NO: 3402 - DNA, 146 bp, Artificial Sequence
  Bisulfite Padlock Probe
  misc_feature 93, 94, 95, 96, 97, 98: n = A,T,C or G
gactggaagagcactgttatatacgcgcgaaacgaaacaaaaacgttggaggctcatcgttcctattcaggcagatgttatcgaggtccgacnnnnnnaacgcccccgaatcctaaactacaaaacgatcggatacgcatgaggct

SEQ ID NO: 3403 - DNA, 146 bp, Artificial Sequence
  Bisulfite Padlock Probe
  misc_feature 93, 94, 95, 96, 97, 98: n = A,T,C or G
gactggaagagcactgttatatacgcgcgaaacgaaacgaaaacgttggaggctcatcgttcctattcaggcagatgttatcgaggtccgacnnnnnnaacgcccccgaatcctaaactacgaaacgatcggatacgcatgaggct

SEQ ID NO: 3404 - DNA, 146 bp, Artificial Sequence
  Bisulfite Padlock Probe
  misc_feature 92, 93, 94, 95, 96, 97: n = A,T,C or G
gactggaagagcactgttatatactaccgatacgctacatcccgttggaggctcatcgttcctattcaggcagatgttatcgaggtccgacnnnnnncttccaacccttaaactaacccaaaccacgatcggatacgcatgaggct

SEQ ID NO: 3405 - DNA, 146 bp, Artificial Sequence
  Bisulfite Padlock Probe
  misc_feature 92, 93, 94, 95, 96, 97: n = A,T,C or G
gactggaagagcactgttatatactaccgatacgctacgtcccgttggaggctcatcgttcctattcaggcagatgttatcgaggtccgacnnnnnncttccaacccttaaactaacccaaaccacgatcggatacgcatgaggct

SEQ ID NO: 3406 - DNA, 146 bp, Artificial Sequence
  Bisulfite Padlock Probe
  misc_feature 94, 95, 96, 97, 98, 99: n = A,T,C or G
gactggaagagcactgttatatataaaacaactaacaacactaaagttggaggctcatcgttcctattcaggcagatgttatcgaggtccgacnnnnnnctcctcccctaaacacatctcctaaacgatcggatacgcatgaggct

SEQ ID NO: 3407 - DNA, 146 bp, Artificial Sequence
  Bisulfite Padlock Probe
  misc_feature 94, 95, 96, 97, 98, 99: n = A,T,C or G
gactggaagagcactgttatatataaaacaactaacaacgctaaagttggaggctcatcgttcctattcaggcagatgttatcgaggtccgacnnnnnnctcctcccctaaacacatctcctaaacgatcggatacgcatgaggct

SEQ ID NO: 3408 - DNA, 146 bp, Artificial Sequence
  Bisulfite Padlock Probe
  misc_feature 92, 93, 94, 95, 96, 97: n = A,T,C or G
gactggaagagcactgttatatcataaaccaataaaacccaccgttggaggctcatcgttcctattcaggcagatgttatcgaggtccgacnnnnnncaaaaacgaacgaaacacaaacaactaacgatcggatacgcatgaggct

SEQ ID NO: 3409 - DNA, 146 bp, Artificial Sequence
  Bisulfite Padlock Probe
  misc_feature 92, 93, 94, 95, 96, 97: n = A,T,C or G
gactggaagagcactgttatatcataaaccaataaaacccgccgttggaggctcatcgttcctattcaggcagatgttatcgaggtccgacnnnnnncaaaaacgaacgaaacacgaacaactaacgatcggatacgcatgaggct

SEQ ID NO: 3410 - DNA, 146 bp, Artificial Sequence
  Bisulfite Padlock Probe
  misc_feature 93, 94, 95, 96, 97, 98: n = A,T,C or G
gactggaagagcactgttatattaaaaaccaaatcccctttaacgttggaggctcatcgttcctattcaggcagatgttatcgaggtccgacnnnnnnatataaccaaataacaccctttaaaaccgatcggatacgcatgaggct

SEQ ID NO: 3411 - DNA, 146 bp, Artificial Sequence
  Bisulfite Padlock Probe
  misc_feature 93, 94, 95, 96, 97, 98: n = A,T,C or G
gactggaagagcactgttatattaaaaaccgaatcccctttaacgttggaggctcatcgttcctattcaggcagatgttatcgaggtccgacnnnnnnatataaccaaataacgccctttaaaaccgatcggatacgcatgaggct

SEQ ID NO: 3412 - DNA, 146 bp, Artificial Sequence
  Bisulfite Padlock Probe
  misc_feature 96, 97, 98, 99, 100, 101: n = A,T,C or G
gactggaagagcactgttatattaaaaacttctacaataaattaatagttggaggctcatcgttcctattcaggcagatgttatcgaggtccgacnnnnnnttttaaaataaaattattcaaaaccgatcggatacgcatgaggct

SEQ ID NO: 3413 - DNA, 146 bp, Artificial Sequence
  Bisulfite Padlock Probe
  misc_feature 96, 97, 98, 99, 100, 101: n = A,T,C or G
gactggaagagcactgttatattaaaaacttctacgataaattaatagttggaggctcatcgttcctattcaggcagatgttatcgaggtccgacnnnnnnttttaaaataaaattattcaaaaccgatcggatacgcatgaggct

SEQ ID NO: 3414 - DNA, 146 bp, Artificial Sequence
  Bisulfite Padlock Probe
  misc_feature 94, 95, 96, 97, 98, 99: n = A,T,C or G
gactggaagagcactgttatattaaaacaacgaccaccaaactaagttggaggctcatcgttcctattcaggcagatgttatcgaggtccgacnnnnnnaactccgcgatcaactctcccaaaaaagatcggatacgcatgaggct

SEQ ID NO: 3415 - DNA, 146 bp, Artificial Sequence
  Bisulfite Padlock Probe
  misc_feature 94, 95, 96, 97, 98, 99: n = A,T,C or G
gactggaagagcactgttatattaaaacaacgaccgccaaactaagttggaggctcatcgttcctattcaggcagatgttatcgaggtccgacnnnnnnaactccgcgatcaactctcccgaaaaagatcggatacgcatgaggct

SEQ ID NO: 3416 - DNA, 146 bp, Artificial Sequence
  Bisulfite Padlock Probe
  misc_feature 94, 95, 96, 97, 98, 99: n = A,T,C or G
gactggaagagcactgttatattaattataaaacccccaaatatcgttggaggctcatcgttcctattcaggcagatgttatcgaggtccgacnnnnnnacactaacgcgaaaccttaataatacagatcggatacgcatgaggct

SEQ ID NO: 3417 - DNA, 146 bp, Artificial Sequence
  Bisulfite Padlock Probe
  misc_feature 94, 95, 96, 97, 98, 99: n = A,T,C or G
gactggaagagcactgttatattaattataaaacccccgaatatcgttggaggctcatcgttcctattcaggcagatgttatcgaggtccgacnnnnnnacactaacgcgaaaccttaataatacggatcggatacgcatgaggct

SEQ ID NO: 3418 - DNA, 146 bp, Artificial Sequence
  Bisulfite Padlock Probe
  misc_feature 93, 94, 95, 96, 97, 98: n = A,T,C or G
gactggaagagcactgttatcaaaatacaaaaccaataactcccgttggaggctcatcgttcctattcaggcagatgttatcgaggtccgacnnnnnnataaaccgcaaaaccaaaaacaaaactcgatcggatacgcatgaggct

SEQ ID NO: 3419 - DNA, 146 bp, Artificial Sequence
  Bisulfite Padlock Probe
  misc_feature 93, 94, 95, 96, 97, 98: n = A,T,C or G
gactggaagagcactgttatcaaaatacaaaaccgataactcccgttggaggctcatcgttcctattcaggcagatgttatcgaggtccgacnnnnnnataaaccgcaaaaccaaaaacgaaactcgatcggatacgcatgaggct

SEQ ID NO: 3420 - DNA, 146 bp, Artificial Sequence
  Bisulfite Padlock Probe
  misc_feature 92, 93, 94, 95, 96, 97: n = A,T,C or G
gactggaagagcactgttatcaaacttaacatatttaacacccgttggaggctcatcgttcctattcaggcagatgttatcgaggtccgacnnnnnnccattataaaacaccaaaataatcaaattgatcggatacgcatgaggct

SEQ ID NO: 3421 - DNA, 146 bp, Artificial Sequence
  Bisulfite Padlock Probe
  misc_feature 92, 93, 94, 95, 96, 97: n = A,T,C or G
gactggaagagcactgttatcaaacttaacatatttaacacccgttggaggctcatcgttcctattcaggcagatgttatcgaggtccgacnnnnnnccattataaaacaccgaaataatcaaattgatcggatacgcatgaggct

SEQ ID NO: 3422 - DNA, 146 bp, Artificial Sequence
  Bisulfite Padlock Probe
  misc_feature 93, 94, 95, 96, 97, 98: n = A,T,C or G
gactggaagagcactgttatcaactaaaataaaaacctaatatcgttggaggctcatcgttcctattcaggcagatgttatcgaggtccgacnnnnnnaacaaaactcataatcaaaaacactttcgatcggatacgcatgaggct

SEQ ID NO: 3423 - DNA, 146 bp, Artificial Sequence
  Bisulfite Padlock Probe
  misc_feature 93, 94, 95, 96, 97, 98: n = A,T,C or G
gactggaagagcactgttatcaactaaaataaaaacctaatatcgttggaggctcatcgttcctattcaggcagatgttatcgaggtccgacnnnnnnaacaaaactcgtaatcaaaaacactttcgatcggatacgcatgaggct

SEQ ID NO: 3424 - DNA, 146 bp, Artificial Sequence
  Bisulfite Padlock Probe
  misc_feature 94, 95, 96, 97, 98, 99: n = A,T,C or G
gactggaagagcactgttatcaacttcctcgaaacccaaatacacgttggaggctcatcgttcctattcaggcagatgttatcgaggtccgacnnnnnnaaaaacatccaacactttataaatttcgatcggatacgcatgaggct

SEQ ID NO: 3425 - DNA, 146 bp, Artificial Sequence
  Bisulfite Padlock Probe
  misc_feature 94, 95, 96, 97, 98, 99: n = A,T,C or G
gactggaagagcactgttatcaacttcctcgaaacccaaatacgcgttggaggctcatcgttcctattcaggcagatgttatcgaggtccgacnnnnnnaaaaacatccaacactttataaatttcgatcggatacgcatgaggct

SEQ ID NO: 3426 - DNA, 146 bp, Artificial Sequence
  Bisulfite Padlock Probe
  misc_feature 95, 96, 97, 98, 99, 100: n = A,T,C or G
gactggaagagcactgttatcaatcaaaacttcataatataaatacgttggaggctcatcgttcctattcaggcagatgttatcgaggtccgacnnnnnnacgaaccctacgtcgaaataccactcgatcggatacgcatgaggct

SEQ ID NO: 3427 - DNA, 146 bp, Artificial Sequence
  Bisulfite Padlock Probe
  misc_feature 95, 96, 97, 98, 99, 100: n = A,T,C or G
gactggaagagcactgttatcaatcaaaacttcgtaatataaatacgttggaggctcatcgttcctattcaggcagatgttatcgaggtccgacnnnnnnacgaaccctacgtcgaaataccgctcgatcggatacgcatgaggct

SEQ ID NO: 3428 - DNA, 146 bp, Artificial Sequence
  Bisulfite Padlock Probe
  misc_feature 95, 96, 97, 98, 99, 100: n = A,T,C or G
gactggaagagcactgttatcactcacgaaacgaccacaacaaaccgttggaggctcatcgttcctattcaggcagatgttatcgaggtccgacnnnnnnccctcactccaaacctaccctaacacgatcggatacgcatgaggct

SEQ ID NO: 3429 - DNA, 146 bp, Artificial Sequence
  Bisulfite Padlock Probe
  misc_feature 95, 96, 97, 98, 99, 100: n = A,T,C or G
gactggaagagcactgttatcactcacgaaacgaccacgacaaaccgttggaggctcatcgttcctattcaggcagatgttatcgaggtccgacnnnnnnccctcactccaaacctaccctaacacgatcggatacgcatgaggct

SEQ ID NO: 3430 - DNA, 146 bp, Artificial Sequence
  Bisulfite Padlock Probe
  misc_feature 94, 95, 96, 97, 98, 99: n = A,T,C or G
gactggaagagcactgttatcattcattcatttattaattcattcgttggaggctcatcgttcctattcaggcagatgttatcgaggtccgacnnnnnncgactctaacgaacgcacataatacccgatcggatacgcatgaggct

SEQ ID NO: 3431 - DNA, 146 bp, Artificial Sequence
  Bisulfite Padlock Probe
  misc_feature 94, 95, 96, 97, 98, 99: n = A,T,C or G
gactggaagagcactgttatcattcattcatttattaattcgttcgttggaggctcatcgttcctattcaggcagatgttatcgaggtccgacnnnnnncgactctaacgaacgcacgtaatacccgatcggatacgcatgaggct

SEQ ID NO: 3432 - DNA, 146 bp, Artificial Sequence
  Bisulfite Padlock Probe
  misc_feature 92, 93, 94, 95, 96, 97: n = A,T,C or G
gactggaagagcactgttatccaaacatttccccaaccaatctgttggaggctcatcgttcctattcaggcagatgttatcgaggtccgacnnnnnnaaaaatatctcctattaatacgcacaactgatcggatacgcatgaggct

SEQ ID NO: 3433 - DNA, 146 bp, Artificial Sequence
  Bisulfite Padlock Probe
  misc_feature 94, 95, 96, 97, 98, 99: n = A,T,C or G
gactggaagagcactgttatccaaaccataaacaacttccaaatcgttggaggctcatcgttcctattcaggcagatgttatcgaggtccgacnnnnnnaaaaacgaacaccgaaacgaaaccaaagatcggatacgcatgaggct

SEQ ID NO: 3434 - DNA, 146 bp, Artificial Sequence
  Bisulfite Padlock Probe
  misc_feature 94, 95, 96, 97, 98, 99: n = A,T,C or G
gactggaagagcactgttatccaaaccataaacgacttccaaatcgttggaggctcatcgttcctattcaggcagatgttatcgaggtccgacnnnnnnaaaaacgaacaccgaaacgaaaccgaagatcggatacgcatgaggct

SEQ ID NO: 3435 - DNA, 146 bp, Artificial Sequence
  Bisulfite Padlock Probe
  misc_feature 92, 93, 94, 95, 96, 97: n = A,T,C or G
gactggaagagcactgttatccaaatcccacctaccctaaaccgttggaggctcatcgttcctattcaggcagatgttatcgaggtccgacnnnnnnaaaaccacctcttaaactcctcctaaaaagatcggatacgcatgaggct

SEQ ID NO: 3436 - DNA, 146 bp, Artificial Sequence
  Bisulfite Padlock Probe
  misc_feature 92, 93, 94, 95, 96, 97: n = A,T,C or G
gactggaagagcactgttatccaaatcccgcctaccctaaaccgttggaggctcatcgttcctattcaggcagatgttatcgaggtccgacnnnnnnaaaaccgcctcttaaactcctcctaaaaagatcggatacgcatgaggct

SEQ ID NO: 3437 - DNA, 146 bp, Artificial Sequence
  Bisulfite Padlock Probe
  misc_feature 94, 95, 96, 97, 98, 99: n = A,T,C or G
gactggaagagcactgttatccaacaaaaaataaaccaaatattcgttggaggctcatcgttcctattcaggcagatgttatcgaggtccgacnnnnnnactccgaaacgtatacaacaaaacctcgatcggatacgcatgaggct

SEQ ID NO: 3438 - DNA, 146 bp, Artificial Sequence
  Bisulfite Padlock Probe
  misc_feature 92, 93, 94, 95, 96, 97: n = A,T,C or G
gactggaagagcactgttatccaacaaaactaaaatataataagttggaggctcatcgttcctattcaggcagatgttatcgaggtccgacnnnnnntaaataatttaaaaacaaaaataaaacccgatcggatacgcatgaggct

SEQ ID NO: 3439 - DNA, 146 bp, Artificial Sequence
  Bisulfite Padlock Probe
  misc_feature 94, 95, 96, 97, 98, 99: n = A,T,C or G
gactggaagagcactgttatccaacgaaaaataaaccaaatattcgttggaggctcatcgttcctattcaggcagatgttatcgaggtccgacnnnnnnactccgaaacgtatacaacgaaacctcgatcggatacgcatgaggct

SEQ ID NO: 3440 - DNA, 146 bp, Artificial Sequence
  Bisulfite Padlock Probe
  misc_feature 92, 93, 94, 95, 96, 97: n = A,T,C or G
gactggaagagcactgttatccaacgaaactaaaatataataagttggaggctcatcgttcctattcaggcagatgttatcgaggtccgacnnnnnntaaataatttaaaaacaaaaataaaacccgatcggatacgcatgaggct

SEQ ID NO: 3441 - DNA, 146 bp, Artificial Sequence
  Bisulfite Padlock Probe
  misc_feature 95, 96, 97, 98, 99, 100: n = A,T,C or G
gactggaagagcactgttatccacataataattactaaaaataccagttggaggctcatcgttcctattcaggcagatgttatcgaggtccgacnnnnnnaaaaacaccgcgaaccacaaaacaaagatcggatacgcatgaggct

SEQ ID NO: 3442 - DNA, 146 bp, Artificial Sequence
  Bisulfite Padlock Probe
  misc_feature 95, 96, 97, 98, 99, 100: n = A,T,C or G
gactggaagagcactgttatccacgtaataattactaaaaataccagttggaggctcatcgttcctattcaggcagatgttatcgaggtccgacnnnnnnaaaaacaccgcgaaccacgaaacaaagatcggatacgcatgaggct

SEQ ID NO: 3443 - DNA, 146 bp, Artificial Sequence
  Bisulfite Padlock Probe
  misc_feature 93, 94, 95, 96, 97, 98: n = A,T,C or G
gactggaagagcactgttatccactctactctaaaaactttacagttggaggctcatcgttcctattcaggcagatgttatcgaggtccgacnnnnnnttaaaaacacaaataaacctacttatttgatcggatacgcatgaggct

SEQ ID NO: 3444 - DNA, 146 bp, Artificial Sequence
  Bisulfite Padlock Probe
  misc_feature 93, 94, 95, 96, 97, 98: n = A,T,C or G
gactggaagagcactgttatccactctactctaaaaactttacagttggaggctcatcgttcctattcaggcagatgttatcgaggtccgacnnnnnnttaaaaacgcaaataaacctacttatttgatcggatacgcatgaggct

SEQ ID NO: 3445 - DNA, 146 bp, Artificial Sequence
  Bisulfite Padlock Probe
  misc_feature 93, 94, 95, 96, 97, 98: n = A,T,C or G
gactggaagagcactgttatccacttcgctatctactaccactagttggaggctcatcgttcctattcaggcagatgttatcgaggtccgacnnnnnncctaaacgtaccaactaaactacaacccgatcggatacgcatgaggct

SEQ ID NO: 3446 - DNA, 146 bp, Artificial Sequence
  Bisulfite Padlock Probe
  misc_feature 93, 94, 95, 96, 97, 98: n = A,T,C or G
gactggaagagcactgttatccacttcgctatctactaccgctagttggaggctcatcgttcctattcaggcagatgttatcgaggtccgacnnnnnncctaaacgtaccgactaaactacaacccgatcggatacgcatgaggct

SEQ ID NO: 3447 - DNA, 146 bp, Artificial Sequence
  Bisulfite Padlock Probe
  misc_feature 96, 97, 98, 99, 100, 101: n = A,T,C or G
gactggaagagcactgttatcccaaattacaaacaaattttcttaacgttggaggctcatcgttcctattcaggcagatgttatcgaggtccgacnnnnnncaacctcaacacctaacctaaatccgatcggatacgcatgaggct

SEQ ID NO: 3448 - DNA, 146 bp, Artificial Sequence
  Bisulfite Padlock Probe
  misc_feature 96, 97, 98, 99, 100, 101: n = A,T,C or G
gactggaagagcactgttatcccaaattacaaacgaattttcttaacgttggaggctcatcgttcctattcaggcagatgttatcgaggtccgacnnnnnncaacctcaacacctaacctaaatccgatcggatacgcatgaggct

SEQ ID NO: 3449 - DNA, 146 bp, Artificial Sequence
  Bisulfite Padlock Probe
  misc_feature 94, 95, 96, 97, 98, 99: n = A,T,C or G
gactggaagagcactgttatcccattacaacaccgacccaaacacgttggaggctcatcgttcctattcaggcagatgttatcgaggtccgacnnnnnnacgacctcctccgaaaaaccaaaaaccgatcggatacgcatgaggct

SEQ ID NO: 3450 - DNA, 146 bp, Artificial Sequence
  Bisulfite Padlock Probe
  misc_feature 94, 95, 96, 97, 98, 99: n = A,T,C or G
gactggaagagcactgttatcccattacaacaccgacccgaacacgttggaggctcatcgttcctattcaggcagatgttatcgaggtccgacnnnnnnacgacctcctccgaaaaaccgaaaaccgatcggatacgcatgaggct

SEQ ID NO: 3451 - DNA, 146 bp, Artificial Sequence
  Bisulfite Padlock Probe
  misc_feature 96, 97, 98, 99, 100, 101: n = A,T,C or G
gactggaagagcactgttatcccccaaaaaccaaaacaaaaacacccgttggaggctcatcgttcctattcaggcagatgttatcgaggtccgacnnnnnnaaaaaccgaaaaacaaacctaaaaagatcggatacgcatgaggct

SEQ ID NO: 3452 - DNA, 146 bp, Artificial Sequence
  Bisulfite Padlock Probe
  misc_feature 96, 97, 98, 99, 100, 101: n = A,T,C or G
gactggaagagcactgttatcccccaaaaaccaaaacgaaaacacccgttggaggctcatcgttcctattcaggcagatgttatcgaggtccgacnnnnnnaaaaaccgaaaaacgaacctaaaaagatcggatacgcatgaggct

SEQ ID NO: 3453 - DNA, 146 bp, Artificial Sequence
  Bisulfite Padlock Probe
  misc_feature 92, 93, 94, 95, 96, 97: n = A,T,C or G
gactggaagagcactgttatcccctaaacaaccaaataatctcgttggaggctcatcgttcctattcaggcagatgttatcgaggtccgacnnnnnnaaaactaactcattctcaaaccaactctcgatcggatacgcatgaggct

SEQ ID NO: 3454 - DNA, 146 bp, Artificial Sequence
  Bisulfite Padlock Probe
  misc_feature 92, 93, 94, 95, 96, 97: n = A,T,C or G
gactggaagagcactgttatcccctaaacaaccaaataatctcgttggaggctcatcgttcctattcaggcagatgttatcgaggtccgacnnnnnnaaaactaactcgttctcaaaccaactctcgatcggatacgcatgaggct

SEQ ID NO: 3455 - DNA, 146 bp, Artificial Sequence
  Bisulfite Padlock Probe
  misc_feature 92, 93, 94, 95, 96, 97: n = A,T,C or G
gactggaagagcactgttatcccctatcccaatcatatccaccgttggaggctcatcgttcctattcaggcagatgttatcgaggtccgacnnnnnnctccttaccctttcaaccgcccaaaatacgatcggatacgcatgaggct

SEQ ID NO: 3456 - DNA, 146 bp, Artificial Sequence
  Bisulfite Padlock Probe
  misc_feature 92, 93, 94, 95, 96, 97: n = A,T,C or G
gactggaagagcactgttatcccctatcccgatcatatccaccgttggaggctcatcgttcctattcaggcagatgttatcgaggtccgacnnnnnnctccttaccctttcaaccgcccgaaatacgatcggatacgcatgaggct

SEQ ID NO: 3457 - DNA, 146 bp, Artificial Sequence
  Bisulfite Padlock Probe
  misc_feature 95, 96, 97, 98, 99, 100: n = A,T,C or G
gactggaagagcactgttatcccgaaaacaactaactactctaaaagttggaggctcatcgttcctattcaggcagatgttatcgaggtccgacnnnnnnaaaatactaacgacgccacccctctcgatcggatacgcatgaggct

SEQ ID NO: 3458 - DNA, 146 bp, Artificial Sequence
  Bisulfite Padlock Probe
  misc_feature 95, 96, 97, 98, 99, 100: n = A,T,C or G
gactggaagagcactgttatcccgaaaacgactaactactctaaaagttggaggctcatcgttcctattcaggcagatgttatcgaggtccgacnnnnnnaaaatactaacgacgccgcccctctcgatcggatacgcatgaggct

SEQ ID NO: 3459 - DNA, 146 bp, Artificial Sequence
  Bisulfite Padlock Probe
  misc_feature 92, 93, 94, 95, 96, 97: n = A,T,C or G
gactggaagagcactgttatcccgaccatcccatctacctaccgttggaggctcatcgttcctattcaggcagatgttatcgaggtccgacnnnnnnctacgaaacccgtacccgactctacaaaagatcggatacgcatgaggct

SEQ ID NO: 3460 - DNA, 146 bp, Artificial Sequence
  Bisulfite Padlock Probe
  misc_feature 92, 93, 94, 95, 96, 97: n = A,T,C or G
gactggaagagcactgttatcccgaccgtcccatctacctaccgttggaggctcatcgttcctattcaggcagatgttatcgaggtccgacnnnnnnctacgaaacccgtacccgactctacgaaagatcggatacgcatgaggct

SEQ ID NO: 3461 - DNA, 146 bp, Artificial Sequence
  Bisulfite Padlock Probe
  misc_feature 95, 96, 97, 98, 99, 100: n = A,T,C or G
gactggaagagcactgttatcccgccgtttataacgaaacaaaaaagttggaggctcatcgttcctattcaggcagatgttatcgaggtccgacnnnnnnctaaccgtcaacactaccgcaaaaaagatcggatacgcatgaggct

SEQ ID NO: 3462 - DNA, 146 bp, Artificial Sequence
  Bisulfite Padlock Probe
  misc_feature 95, 96, 97, 98, 99, 100: n = A,T,C or G
gactggaagagcactgttatcccgccgtttataacgaaacgaaaaagttggaggctcatcgttcctattcaggcagatgttatcgaggtccgacnnnnnnctaaccgtcaacactaccgcgaaaaagatcggatacgcatgaggct

SEQ ID NO: 3463 - DNA, 146 bp, Artificial Sequence
  Bisulfite Padlock Probe
  misc_feature 92, 93, 94, 95, 96, 97: n = A,T,C or G
gactggaagagcactgttatccctaaaaacaaaactctaacacgttggaggctcatcgttcctattcaggcagatgttatcgaggtccgacnnnnnnctacaacaccacacatctaaaccaacccagatcggatacgcatgaggct

SEQ ID NO: 3464 - DNA, 146 bp, Artificial Sequence
  Bisulfite Padlock Probe
  misc_feature 92, 93, 94, 95, 96, 97: n = A,T,C or G
gactggaagagcactgttatccctaaaaacgaaactctaacacgttggaggctcatcgttcctattcaggcagatgttatcgaggtccgacnnnnnnctacaacgccacacatctaaaccaacccagatcggatacgcatgaggct

SEQ ID NO: 3465 - DNA, 146 bp, Artificial Sequence
  Bisulfite Padlock Probe
  misc_feature 92, 93, 94, 95, 96, 97: n = A,T,C or G
gactggaagagcactgttatccctcaactccaccccctacctcgttggaggctcatcgttcctattcaggcagatgttatcgaggtccgacnnnnnncttccactcttaacccaacaaaccaataagatcggatacgcatgaggct

SEQ ID NO: 3466 - DNA, 146 bp, Artificial Sequence
  Bisulfite Padlock Probe
  misc_feature 92, 93, 94, 95, 96, 97: n = A,T,C or G
gactggaagagcactgttatccgaaataaaaccaaacacccccgttggaggctcatcgttcctattcaggcagatgttatcgaggtccgacnnnnnnaaatatcgaaacacacctaaaacctccccgatcggatacgcatgaggct

SEQ ID NO: 3467 - DNA, 146 bp, Artificial Sequence
  Bisulfite Padlock Probe
  misc_feature 92, 93, 94, 95, 96, 97: n = A,T,C or G
gactggaagagcactgttatccgaaataaaaccaaacgcccccgttggaggctcatcgttcctattcaggcagatgttatcgaggtccgacnnnnnnaaatatcgaaacgcacctaaaacctccccgatcggatacgcatgaggct

SEQ ID NO: 3468 - DNA, 146 bp, Artificial Sequence
  Bisulfite Padlock Probe
  misc_feature 92, 93, 94, 95, 96, 97: n = A,T,C or G
gactggaagagcactgttatccgaacatttccccaaccaatctgttggaggctcatcgttcctattcaggcagatgttatcgaggtccgacnnnnnnaaaaatatctcctattaatacgcgcaactgatcggatacgcatgaggct

SEQ ID NO: 3469 - DNA, 146 bp, Artificial Sequence
  Bisulfite Padlock Probe
  misc_feature 93, 94, 95, 96, 97, 98: n = A,T,C or G
gactggaagagcactgttatcctaaaaaccaacctcaaatacccgttggaggctcatcgttcctattcaggcagatgttatcgaggtccgacnnnnnnaaaaacgaaacgacaaaacccccaaaaagatcggatacgcatgaggct

SEQ ID NO: 3470 - DNA, 146 bp, Artificial Sequence
  Bisulfite Padlock Probe
  misc_feature 93, 94, 95, 96, 97, 98: n = A,T,C or G
gactggaagagcactgttatcctaaaaaccaacctcaaatacccgttggaggctcatcgttcctattcaggcagatgttatcgaggtccgacnnnnnnaaaaacgaaacgacgaaacccccaaaaagatcggatacgcatgaggct

SEQ ID NO: 3471 - DNA, 146 bp, Artificial Sequence
  Bisulfite Padlock Probe
  misc_feature 93, 94, 95, 96, 97, 98: n = A,T,C or G
gactggaagagcactgttatcctataacgaaactaacaaactccgttggaggctcatcgttcctattcaggcagatgttatcgaggtccgacnnnnnnttttatttctatcaaactatccctaaccgatcggatacgcatgaggct

SEQ ID NO: 3472 - DNA, 146 bp, Artificial Sequence
  Bisulfite Padlock Probe
  misc_feature 93, 94, 95, 96, 97, 98: n = A,T,C or G
gactggaagagcactgttatcctataacgaaactaacgaactccgttggaggctcatcgttcctattcaggcagatgttatcgaggtccgacnnnnnnttttatttctatcaaactatccctaaccgatcggatacgcatgaggct

SEQ ID NO: 3473 - DNA, 146 bp, Artificial Sequence
  Bisulfite Padlock Probe
  misc_feature 96, 97, 98, 99, 100, 101: n = A,T,C or G
gactggaagagcactgttatccttcctaatccccctcctctaccctcgttggaggctcatcgttcctattcaggcagatgttatcgaggtccgacnnnnnncgatcacctaccgaacaatcatcccgatcggatacgcatgaggct

SEQ ID NO: 3474 - DNA, 146 bp, Artificial Sequence
  Bisulfite Padlock Probe
  misc_feature 96, 97, 98, 99, 100, 101: n = A,T,C or G
gactggaagagcactgttatccttcctaatccccctcctctaccctcgttggaggctcatcgttcctattcaggcagatgttatcgaggtccgacnnnnnncgatcacctaccgaacgatcatcccgatcggatacgcatgaggct

SEQ ID NO: 3475 - DNA, 146 bp, Artificial Sequence
  Bisulfite Padlock Probe
  misc_feature 96, 97, 98, 99, 100, 101: n = A,T,C or G
gactggaagagcactgttatcgaaaacataaaaacttcttaaaatccgttggaggctcatcgttcctattcaggcagatgttatcgaggtccgacnnnnnncaaataacgcgactaaaccaaaaaagatcggatacgcatgaggct

SEQ ID NO: 3476 - DNA, 146 bp, Artificial Sequence
  Bisulfite Padlock Probe
  misc_feature 94, 95, 96, 97, 98, 99: n = A,T,C or G
gactggaagagcactgttatcgaaaacatctaccactaccaaaaagttggaggctcatcgttcctattcaggcagatgttatcgaggtccgacnnnnnnatcctcaacactaaacaaaactacatcgatcggatacgcatgaggct

SEQ ID NO: 3477 - DNA, 146 bp, Artificial Sequence
  Bisulfite Padlock Probe
  misc_feature 94, 95, 96, 97, 98, 99: n = A,T,C or G
gactggaagagcactgttatcgaaaacatctaccgctaccaaaaagttggaggctcatcgttcctattcaggcagatgttatcgaggtccgacnnnnnnatcctcaacactaaacgaaactacatcgatcggatacgcatgaggct

SEQ ID NO: 3478 - DNA, 146 bp, Artificial Sequence
  Bisulfite Padlock Probe
  misc_feature 96, 97, 98, 99, 100, 101: n = A,T,C or G
gactggaagagcactgttatcgaaaacgtaaaaacttcttaaaatccgttggaggctcatcgttcctattcaggcagatgttatcgaggtccgacnnnnnncaaataacgcgactaaaccgaaaaagatcggatacgcatgaggct

SEQ ID NO: 3479 - DNA, 146 bp, Artificial Sequence
  Bisulfite Padlock Probe
  misc_feature 93, 94, 95, 96, 97, 98: n = A,T,C or G
gactggaagagcactgttatcgaaacaaaaaataaacctaaaaagttggaggctcatcgttcctattcaggcagatgttatcgaggtccgacnnnnnnctctctctacaaaccaccaactaaaacagatcggatacgcatgaggct

SEQ ID NO: 3480 - DNA, 146 bp, Artificial Sequence
  Bisulfite Padlock Probe
  misc_feature 93, 94, 95, 96, 97, 98: n = A,T,C or G
gactggaagagcactgttatcgaaacgaaaaataaacctaaaaagttggaggctcatcgttcctattcaggcagatgttatcgaggtccgacnnnnnnctctctctacaaaccaccgactaaaacagatcggatacgcatgaggct

SEQ ID NO: 3481 - DNA, 146 bp, Artificial Sequence
  Bisulfite Padlock Probe
  misc_feature 92, 93, 94, 95, 96, 97: n = A,T,C or G
gactggaagagcactgttatcgacccaactacacctccaactcgttggaggctcatcgttcctattcaggcagatgttatcgaggtccgacnnnnnnctccttaaccaaacgacaacaatcctaacgatcggatacgcatgaggct

SEQ ID NO: 3482 - DNA, 146 bp, Artificial Sequence
  Bisulfite Padlock Probe
  misc_feature 92, 93, 94, 95, 96, 97: n = A,T,C or G
gactggaagagcactgttatcgacccaactacgcctccaactcgttggaggctcatcgttcctattcaggcagatgttatcgaggtccgacnnnnnnctccttaaccaaacgacgacaatcctaacgatcggatacgcatgaggct

SEQ ID NO: 3483 - DNA, 146 bp, Artificial Sequence
  Bisulfite Padlock Probe
  misc_feature 93, 94, 95, 96, 97, 98: n = A,T,C or G
gactggaagagcactgttatcgataaaacgcaaaaccaaaaaacgttggaggctcatcgttcctattcaggcagatgttatcgaggtccgacnnnnnntcctttatatttctttcccctcctcacagatcggatacgcatgaggct

SEQ ID NO: 3484 - DNA, 146 bp, Artificial Sequence
  Bisulfite Padlock Probe
  misc_feature 93, 94, 95, 96, 97, 98: n = A,T,C or G
gactggaagagcactgttatcgataaaacgcaaaaccgaaaaacgttggaggctcatcgttcctattcaggcagatgttatcgaggtccgacnnnnnntcctttatatttctttcccctcctcacagatcggatacgcatgaggct

SEQ ID NO: 3485 - DNA, 146 bp, Artificial Sequence
  Bisulfite Padlock Probe
  misc_feature 92, 93, 94, 95, 96, 97: n = A,T,C or G
gactggaagagcactgttatcgataacgacgacgacccaaaacgttggaggctcatcgttcctattcaggcagatgttatcgaggtccgacnnnnnncccaacacttacaccacccaataattaatgatcggatacgcatgaggct

SEQ ID NO: 3486 - DNA, 146 bp, Artificial Sequence
  Bisulfite Padlock Probe
  misc_feature 92, 93, 94, 95, 96, 97: n = A,T,C or G
gactggaagagcactgttatcgataacgacgacgacccgaaacgttggaggctcatcgttcctattcaggcagatgttatcgaggtccgacnnnnnncccaacacttacaccgcccaataattaatgatcggatacgcatgaggct

SEQ ID NO: 3487 - DNA, 146 bp, Artificial Sequence
  Bisulfite Padlock Probe
  misc_feature 92, 93, 94, 95, 96, 97: n = A,T,C or G
gactggaagagcactgttatcgatcttcacgaccgacacctacgttggaggctcatcgttcctattcaggcagatgttatcgaggtccgacnnnnnncgaactcaacaaatacgaaacaacataacgatcggatacgcatgaggct

SEQ ID NO: 3488 - DNA, 146 bp, Artificial Sequence
  Bisulfite Padlock Probe
  misc_feature 92, 93, 94, 95, 96, 97: n = A,T,C or G
gactggaagagcactgttatcgatcttcacgaccgacgcctacgttggaggctcatcgttcctattcaggcagatgttatcgaggtccgacnnnnnncgaactcaacaaatacgaaacgacataacgatcggatacgcatgaggct

SEQ ID NO: 3489 - DNA, 146 bp, Artificial Sequence
  Bisulfite Padlock Probe
  misc_feature 92, 93, 94, 95, 96, 97: n = A,T,C or G
gactggaagagcactgttatcgcacctcaaaaatatactacatgttggaggctcatcgttcctattcaggcagatgttatcgaggtccgacnnnnnnaaattctaaccgataatcttcccaacacagatcggatacgcatgaggct

SEQ ID NO: 3490 - DNA, 146 bp, Artificial Sequence
  Bisulfite Padlock Probe
  misc_feature 92, 93, 94, 95, 96, 97: n = A,T,C or G
gactggaagagcactgttatcgcacctcgaaaatatactacatgttggaggctcatcgttcctattcaggcagatgttatcgaggtccgacnnnnnnaaattctaaccgataatcttcccgacacagatcggatacgcatgaggct

SEQ ID NO: 3491 - DNA, 146 bp, Artificial Sequence
  Bisulfite Padlock Probe
  misc_feature 92, 93, 94, 95, 96, 97: n = A,T,C or G
gactggaagagcactgttatcgtaatacaaaacaccctcttccgttggaggctcatcgttcctattcaggcagatgttatcgaggtccgacnnnnnnaaaaataccgaactaaaaccaaacaaccagatcggatacgcatgaggct

SEQ ID NO: 3492 - DNA, 146 bp, Artificial Sequence
  Bisulfite Padlock Probe
  misc_feature 92, 93, 94, 95, 96, 97: n = A,T,C or G
gactggaagagcactgttatcgtaatacaaaacgccctcttccgttggaggctcatcgttcctattcaggcagatgttatcgaggtccgacnnnnnnaaaaataccgaactaaaaccaaacgaccagatcggatacgcatgaggct

SEQ ID NO: 3493 - DNA, 146 bp, Artificial Sequence
  Bisulfite Padlock Probe
  misc_feature 94, 95, 96, 97, 98, 99: n = A,T,C or G
gactggaagagcactgttatctaacaaaacctccctcccaaacccgttggaggctcatcgttcctattcaggcagatgttatcgaggtccgacnnnnnnaataataaccacaaacaaaccaacatcgatcggatacgcatgaggct

SEQ ID NO: 3494 - DNA, 146 bp, Artificial Sequence
  Bisulfite Padlock Probe
  misc_feature 94, 95, 96, 97, 98, 99: n = A,T,C or G
gactggaagagcactgttatctaacaaaacctccctcccaaacccgttggaggctcatcgttcctattcaggcagatgttatcgaggtccgacnnnnnnaataataaccacgaacaaaccaacatcgatcggatacgcatgaggct

SEQ ID NO: 3495 - DNA, 146 bp, Artificial Sequence
  Bisulfite Padlock Probe
  misc_feature 94, 95, 96, 97, 98, 99: n = A,T,C or G
gactggaagagcactgttatctaacctaaaaacaaaatctctctcgttggaggctcatcgttcctattcaggcagatgttatcgaggtccgacnnnnnncccaaaactaacgaaaaacactccttcgatcggatacgcatgaggct

SEQ ID NO: 3496 - DNA, 146 bp, Artificial Sequence
  Bisulfite Padlock Probe
  misc_feature 94, 95, 96, 97, 98, 99: n = A,T,C or G
gactggaagagcactgttatctaacctaaaaacgaaatctctctcgttggaggctcatcgttcctattcaggcagatgttatcgaggtccgacnnnnnncccaaaactaacgaaaaacgctccttcgatcggatacgcatgaggct

SEQ ID NO: 3497 - DNA, 146 bp, Artificial Sequence
  Bisulfite Padlock Probe
  misc_feature 95, 96, 97, 98, 99, 100: n = A,T,C or G
gactggaagagcactgttatctaatcaccctccatcctccccattcgttggaggctcatcgttcctattcaggcagatgttatcgaggtccgacnnnnnnaaaaacctaaacccccaacacaacccgatcggatacgcatgaggct

SEQ ID NO: 3498 - DNA, 146 bp, Artificial Sequence
  Bisulfite Padlock Probe
  misc_feature 95, 96, 97, 98, 99, 100: n = A,T,C or G
gactggaagagcactgttatctaatcgccctccatcctccccattcgttggaggctcatcgttcctattcaggcagatgttatcgaggtccgacnnnnnnaaaaacctaaacccccaacgcaacccgatcggatacgcatgaggct

SEQ ID NO: 3499 - DNA, 146 bp, Artificial Sequence
  Bisulfite Padlock Probe
  misc_feature 93, 94, 95, 96, 97, 98: n = A,T,C or G
gactggaagagcactgttatctacaccaaaatatacaaataaaagttggaggctcatcgttcctattcaggcagatgttatcgaggtccgacnnnnnntaaatatctaaactatatttactcactcgatcggatacgcatgaggct

SEQ ID NO: 3500 - DNA, 146 bp, Artificial Sequence
  Bisulfite Padlock Probe
  misc_feature 95, 96, 97, 98, 99, 100: n = A,T,C or G
gactggaagagcactgttatctacactccaaaactccaaaaataaagttggaggctcatcgttcctattcaggcagatgttatcgaggtccgacnnnnnnactacctaattcctaaacaactcttcgatcggatacgcatgaggct

SEQ ID NO: 3501 - DNA, 146 bp, Artificial Sequence
  Bisulfite Padlock Probe
  misc_feature 93, 94, 95, 96, 97, 98: n = A,T,C or G
gactggaagagcactgttatctacataaaaataacaaataaaaagttggaggctcatcgttcctattcaggcagatgttatcgaggtccgacnnnnnnctaaatacaactccctacctataaaatcgatcggatacgcatgaggct

SEQ ID NO: 3502 - DNA, 146 bp, Artificial Sequence
  Bisulfite Padlock Probe
  misc_feature 93, 94, 95, 96, 97, 98: n = A,T,C or G
gactggaagagcactgttatctacataaaaataacaaataaaaagttggaggctcatcgttcctattcaggcagatgttatcgaggtccgacnnnnnnctaaatacgactccctacctataaaatcgatcggatacgcatgaggct

SEQ ID NO: 3503 - DNA, 146 bp, Artificial Sequence
  Bisulfite Padlock Probe
  misc_feature 92, 93, 94, 95, 96, 97: n = A,T,C or G
gactggaagagcactgttatctacgcgactcccaaaaacctacgttggaggctcatcgttcctattcaggcagatgttatcgaggtccgacnnnnnntattcttctactacacaatcttcaaaatagatcggatacgcatgaggct

SEQ ID NO: 3504 - DNA, 146 bp, Artificial Sequence
  Bisulfite Padlock Probe
  misc_feature 92, 93, 94, 95, 96, 97: n = A,T,C or G
gactggaagagcactgttatctacgcgactcccgaaaacctacgttggaggctcatcgttcctattcaggcagatgttatcgaggtccgacnnnnnntattcttctactacacgatcttcaaaatagatcggatacgcatgaggct

SEQ ID NO: 3505 - DNA, 146 bp, Artificial Sequence
  Bisulfite Padlock Probe
  misc_feature 95, 96, 97, 98, 99, 100: n = A,T,C or G
gactggaagagcactgttatctacgctccaaaactccaaaaataaagttggaggctcatcgttcctattcaggcagatgttatcgaggtccgacnnnnnnactacctaattcctaaacgactcttcgatcggatacgcatgaggct

SEQ ID NO: 3506 - DNA, 146 bp, Artificial Sequence
  Bisulfite Padlock Probe
  misc_feature 92, 93, 94, 95, 96, 97: n = A,T,C or G
gactggaagagcactgttatctctaaactacaataaaccaaccgttggaggctcatcgttcctattcaggcagatgttatcgaggtccgacnnnnnnactctaaactaataactcccatatcacccgatcggatacgcatgaggct

SEQ ID NO: 3507 - DNA, 146 bp, Artificial Sequence
  Bisulfite Padlock Probe
  misc_feature 92, 93, 94, 95, 96, 97: n = A,T,C or G
gactggaagagcactgttatctctaaactacaataaaccgaccgttggaggctcatcgttcctattcaggcagatgttatcgaggtccgacnnnnnnactctaaactaataactcccgtatcacccgatcggatacgcatgaggct

SEQ ID NO: 3508 - DNA, 146 bp, Artificial Sequence
  Bisulfite Padlock Probe
  misc_feature 92, 93, 94, 95, 96, 97: n = A,T,C or G
gactggaagagcactgttatctctaccgaaaactcccaaccacgttggaggctcatcgttcctattcaggcagatgttatcgaggtccgacnnnnnnacctaccgctaactacgtccaaacaaaaagatcggatacgcatgaggct

SEQ ID NO: 3509 - DNA, 146 bp, Artificial Sequence
  Bisulfite Padlock Probe
  misc_feature 92, 93, 94, 95, 96, 97: n = A,T,C or G
gactggaagagcactgttatctctaccgaaaactcccgaccacgttggaggctcatcgttcctattcaggcagatgttatcgaggtccgacnnnnnnacctaccgctaactacgtccgaacaaaaagatcggatacgcatgaggct

SEQ ID NO: 3510 - DNA, 146 bp, Artificial Sequence
  Bisulfite Padlock Probe
  misc_feature 93, 94, 95, 96, 97, 98: n = A,T,C or G
gactggaagagcactgttatcttactatcctctaaataaataacgttggaggctcatcgttcctattcaggcagatgttatcgaggtccgacnnnnnncaaaaatttcaaaatccctttccccctcgatcggatacgcatgaggct

SEQ ID NO: 3511 - DNA, 146 bp, Artificial Sequence
  Bisulfite Padlock Probe
  misc_feature 96, 97, 98, 99, 100, 101: n = A,T,C or G
gactggaagagcactgttatcttcactaatcaataaccccgcaccacgttggaggctcatcgttcctattcaggcagatgttatcgaggtccgacnnnnnncacaccaacgaacccccaaaatcacgatcggatacgcatgaggct

SEQ ID NO: 3512 - DNA, 146 bp, Artificial Sequence
  Bisulfite Padlock Probe
  misc_feature 96, 97, 98, 99, 100, 101: n = A,T,C or G
gactggaagagcactgttatcttcactaatcaataaccccgcgccacgttggaggctcatcgttcctattcaggcagatgttatcgaggtccgacnnnnnncacaccaacgaacccccgaaatcacgatcggatacgcatgaggct

SEQ ID NO: 3513 - DNA, 146 bp, Artificial Sequence
  Bisulfite Padlock Probe
  misc_feature 92, 93, 94, 95, 96, 97: n = A,T,C or G
gactggaagagcactgttatctttctaccaaaaaccaataaaagttggaggctcatcgttcctattcaggcagatgttatcgaggtccgacnnnnnnccccaaatacactaaaaaccaaccaacccgatcggatacgcatgaggct

SEQ ID NO: 3514 - DNA, 146 bp, Artificial Sequence
  Bisulfite Padlock Probe
  misc_feature 92, 93, 94, 95, 96, 97: n = A,T,C or G
gactggaagagcactgttatctttctaccgaaaaccaataaaagttggaggctcatcgttcctattcaggcagatgttatcgaggtccgacnnnnnnccccaaatacgctaaaaaccaaccaacccgatcggatacgcatgaggct

SEQ ID NO: 3515 - DNA, 146 bp, Artificial Sequence
  Bisulfite Padlock Probe
  misc_feature 94, 95, 96, 97, 98, 99: n = A,T,C or G
gactggaagagcactgttattaaaaactcaatcctctcaaataacgttggaggctcatcgttcctattcaggcagatgttatcgaggtccgacnnnnnnaaacacaacttccaccccaaatacctagatcggatacgcatgaggct

SEQ ID NO: 3516 - DNA, 146 bp, Artificial Sequence
  Bisulfite Padlock Probe
  misc_feature 94, 95, 96, 97, 98, 99: n = A,T,C or G
gactggaagagcactgttattaaaaactcgatcctctcaaataacgttggaggctcatcgttcctattcaggcagatgttatcgaggtccgacnnnnnnaaacgcaacttccaccccaaatacctagatcggatacgcatgaggct

SEQ ID NO: 3517 - DNA, 146 bp, Artificial Sequence
  Bisulfite Padlock Probe
  misc_feature 92, 93, 94, 95, 96, 97: n = A,T,C or G
gactggaagagcactgttattaaaatcctcctaaaaatcctacgttggaggctcatcgttcctattcaggcagatgttatcgaggtccgacnnnnnncctacgaaccgacgactaaccaaaaactcgatcggatacgcatgaggct

SEQ ID NO: 3518 - DNA, 146 bp, Artificial Sequence
  Bisulfite Padlock Probe
  misc_feature 92, 93, 94, 95, 96, 97: n = A,T,C or G
gactggaagagcactgttattaaaatcctcctaaaaatcctacgttggaggctcatcgttcctattcaggcagatgttatcgaggtccgacnnnnnncctacgaaccgacgactaaccgaaaactcgatcggatacgcatgaggct

SEQ ID NO: 3519 - DNA, 146 bp, Artificial Sequence
  Bisulfite Padlock Probe
  misc_feature 92, 93, 94, 95, 96, 97: n = A,T,C or G
gactggaagagcactgttattaaacatcttcctaacccaactcgttggaggctcatcgttcctattcaggcagatgttatcgaggtccgacnnnnnnatacttccaactaccgaactccaactatagatcggatacgcatgaggct

SEQ ID NO: 3520 - DNA, 146 bp, Artificial Sequence
  Bisulfite Padlock Probe
  misc_feature 92, 93, 94, 95, 96, 97: n = A,T,C or G
gactggaagagcactgttattaaacatcttcctaacccaactcgttggaggctcatcgttcctattcaggcagatgttatcgaggtccgacnnnnnnatacttccaactaccgaactccgactatagatcggatacgcatgaggct

SEQ ID NO: 3521 - DNA, 146 bp, Artificial Sequence
  Bisulfite Padlock Probe
  misc_feature 96, 97, 98, 99, 100, 101: n = A,T,C or G
gactggaagagcactgttattaaataacacaatcctaaatttaccttgttggaggctcatcgttcctattcaggcagatgttatcgaggtccgacnnnnnncccaacctctacctccccaatactagatcggatacgcatgaggct

SEQ ID NO: 3522 - DNA, 146 bp, Artificial Sequence
  Bisulfite Padlock Probe
  misc_feature 96, 97, 98, 99, 100, 101: n = A,T,C or G
gactggaagagcactgttattaacaacgacgacgtcaacgcaaaaaagttggaggctcatcgttcctattcaggcagatgttatcgaggtccgacnnnnnncatacaaaactcccaacccctacccgatcggatacgcatgaggct

SEQ ID NO: 3523 - DNA, 146 bp, Artificial Sequence
  Bisulfite Padlock Probe
  misc_feature 96, 97, 98, 99, 100, 101: n = A,T,C or G
gactggaagagcactgttattaacaacgacgacgtcaacgcgaaaaagttggaggctcatcgttcctattcaggcagatgttatcgaggtccgacnnnnnncatacgaaactcccaacccctacccgatcggatacgcatgaggct

SEQ ID NO: 3524 - DNA, 146 bp, Artificial Sequence
  Bisulfite Padlock Probe
  misc_feature 92, 93, 94, 95, 96, 97: n = A,T,C or G
gactggaagagcactgttattaaccgaaccccaaaccctatacgttggaggctcatcgttcctattcaggcagatgttatcgaggtccgacnnnnnncctcctccgtaatccttaaaacaaaactagatcggatacgcatgaggct

SEQ ID NO: 3525 - DNA, 146 bp, Artificial Sequence
  Bisulfite Padlock Probe
  misc_feature 92, 93, 94, 95, 96, 97: n = A,T,C or G
gactggaagagcactgttattaaccgaaccccgaaccctatacgttggaggctcatcgttcctattcaggcagatgttatcgaggtccgacnnnnnncctcctccgtaatccttaaaacgaaactagatcggatacgcatgaggct

SEQ ID NO: 3526 - DNA, 146 bp, Artificial Sequence
  Bisulfite Padlock Probe
  misc_feature 92, 93, 94, 95, 96, 97: n = A,T,C or G
gactggaagagcactgttattaataaatataatcacataaaccgttggaggctcatcgttcctattcaggcagatgttatcgaggtccgacnnnnnnaacaaataatccccaacacctcctctaaagatcggatacgcatgaggct

SEQ ID NO: 3527 - DNA, 146 bp, Artificial Sequence
  Bisulfite Padlock Probe
  misc_feature 92, 93, 94, 95, 96, 97: n = A,T,C or G
gactggaagagcactgttattaataaatataatcacgtaaaccgttggaggctcatcgttcctattcaggcagatgttatcgaggtccgacnnnnnnaacaaataatccccaacgcctcctctaaagatcggatacgcatgaggct

SEQ ID NO: 3528 - DNA, 146 bp, Artificial Sequence
  Bisulfite Padlock Probe
  misc_feature 93, 94, 95, 96, 97, 98: n = A,T,C or G
gactggaagagcactgttattaatacgaacgctaaaaacaaaacgttggaggctcatcgttcctattcaggcagatgttatcgaggtccgacnnnnnnccaaatactcatcgtcaacaaaaaactagatcggatacgcatgaggct

SEQ ID NO: 3529 - DNA, 146 bp, Artificial Sequence
  Bisulfite Padlock Probe
  misc_feature 93, 94, 95, 96, 97, 98: n = A,T,C or G
gactggaagagcactgttattaatacgaacgctaaaaacgaaacgttggaggctcatcgttcctattcaggcagatgttatcgaggtccgacnnnnnnccaaatactcatcgtcaacgaaaaactagatcggatacgcatgaggct

SEQ ID NO: 3530 - DNA, 146 bp, Artificial Sequence
  Bisulfite Padlock Probe
  misc_feature 94, 95, 96, 97, 98, 99: n = A,T,C or G
gactggaagagcactgttattacaaaaacctaaacgaaaaccaacgttggaggctcatcgttcctattcaggcagatgttatcgaggtccgacnnnnnnactccttacccctctcgaaactacaccgatcggatacgcatgaggct

SEQ ID NO: 3531 - DNA, 146 bp, Artificial Sequence
  Bisulfite Padlock Probe
  misc_feature 94, 95, 96, 97, 98, 99: n = A,T,C or G
gactggaagagcactgttattacaaaaacctaaacgaaaaccgacgttggaggctcatcgttcctattcaggcagatgttatcgaggtccgacnnnnnnactccttacccctctcgaaactacgccgatcggatacgcatgaggct

SEQ ID NO: 3532 - DNA, 146 bp, Artificial Sequence
  Bisulfite Padlock Probe
  misc_feature 92, 93, 94, 95, 96, 97: n = A,T,C or G
gactggaagagcactgttattacacaaaatttttctttaaaaagttggaggctcatcgttcctattcaggcagatgttatcgaggtccgacnnnnnnaaacaaactataacaatatcaactttcaagatcggatacgcatgaggct

SEQ ID NO: 3533 - DNA, 146 bp, Artificial Sequence
  Bisulfite Padlock Probe
  misc_feature 94, 95, 96, 97, 98, 99: n = A,T,C or G
gactggaagagcactgttattaccaaacaaaatatcaacaaatacgttggaggctcatcgttcctattcaggcagatgttatcgaggtccgacnnnnnnactcccactatctttccttcaaatttcgatcggatacgcatgaggct

SEQ ID NO: 3534 - DNA, 146 bp, Artificial Sequence
  Bisulfite Padlock Probe
  misc_feature 92, 93, 94, 95, 96, 97: n = A,T,C or G
gactggaagagcactgttattcaaacctactcctactaaccccgttggaggctcatcgttcctattcaggcagatgttatcgaggtccgacnnnnnnacttcttcctaacaccccaaaaccaaaccgatcggatacgcatgaggct

SEQ ID NO: 3535 - DNA, 146 bp, Artificial Sequence
  Bisulfite Padlock Probe
  misc_feature 96, 97, 98, 99, 100, 101: n = A,T,C or G
gactggaagagcactgttattcaacaaccccaccttactaaataaatgttggaggctcatcgttcctattcaggcagatgttatcgaggtccgacnnnnnnaccattaccctacccgcaacacctagatcggatacgcatgaggct

SEQ ID NO: 3536 - DNA, 146 bp, Artificial Sequence
  Bisulfite Padlock Probe
  misc_feature 96, 97, 98, 99, 100, 101: n = A,T,C or G
gactggaagagcactgttattcaacaaccccgccttactaaataaatgttggaggctcatcgttcctattcaggcagatgttatcgaggtccgacnnnnnnaccattaccctacccgcgacacctagatcggatacgcatgaggct

SEQ ID NO: 3537 - DNA, 146 bp, Artificial Sequence
  Bisulfite Padlock Probe
  misc_feature 92, 93, 94, 95, 96, 97: n = A,T,C or G
gactggaagagcactgttattcctatccccctccccacctaacgttggaggctcatcgttcctattcaggcagatgttatcgaggtccgacnnnnnnaaaaactataatcaccaataatcctaatcgatcggatacgcatgaggct

SEQ ID NO: 3538 - DNA, 146 bp, Artificial Sequence
  Bisulfite Padlock Probe
  misc_feature 92, 93, 94, 95, 96, 97: n = A,T,C or G
gactggaagagcactgttattcctatccccctccccgcctaacgttggaggctcatcgttcctattcaggcagatgttatcgaggtccgacnnnnnnaaaaactataatcaccgataatcctaatcgatcggatacgcatgaggct

SEQ ID NO: 3539 - DNA, 146 bp, Artificial Sequence
  Bisulfite Padlock Probe
  misc_feature 92, 93, 94, 95, 96, 97: n = A,T,C or G
gactggaagagcactgttattcgaacctactcctactaaccccgttggaggctcatcgttcctattcaggcagatgttatcgaggtccgacnnnnnnacttcttcctaacaccccaaaaccgaaccgatcggatacgcatgaggct

SEQ ID NO: 3540 - DNA, 146 bp, Artificial Sequence
  Bisulfite Padlock Probe
  misc_feature 93, 94, 95, 96, 97, 98: n = A,T,C or G
gactggaagagcactgttattctaaaaccaaataaccacctacagttggaggctcatcgttcctattcaggcagatgttatcgaggtccgacnnnnnnatcttcaatcatccacctatatctcctcgatcggatacgcatgaggct

SEQ ID NO: 3541 - DNA, 146 bp, Artificial Sequence
  Bisulfite Padlock Probe
  misc_feature 93, 94, 95, 96, 97, 98: n = A,T,C or G
gactggaagagcactgttattctaaaaccaaataaccacctacggttggaggctcatcgttcctattcaggcagatgttatcgaggtccgacnnnnnnatcttcaatcgtccacctatatctcctcgatcggatacgcatgaggct

SEQ ID NO: 3542 - DNA, 146 bp, Artificial Sequence
  Bisulfite Padlock Probe
  misc_feature 96, 97, 98, 99, 100, 101: n = A,T,C or G
gactggaagagcactgttattctaaaaccaaattttaacctttaaaagttggaggctcatcgttcctattcaggcagatgttatcgaggtccgacnnnnnnaactaaaacccgaactaccgacaccgatcggatacgcatgaggct

SEQ ID NO: 3543 - DNA, 146 bp, Artificial Sequence
  Bisulfite Padlock Probe
  misc_feature 96, 97, 98, 99, 100, 101: n = A,T,C or G
gactggaagagcactgttattctaaaaccaaattttaacctttaaaagttggaggctcatcgttcctattcaggcagatgttatcgaggtccgacnnnnnnaactaaaacccgaactaccgacgccgatcggatacgcatgaggct

SEQ ID NO: 3544 - DNA, 146 bp, Artificial Sequence
  Bisulfite Padlock Probe
  misc_feature 96, 97, 98, 99, 100, 101: n = A,T,C or G
gactggaagagcactgttattctcgactccctaactacgcgcaatacgttggaggctcatcgttcctattcaggcagatgttatcgaggtccgacnnnnnnccataaactcaaacgcactcctaccgatcggatacgcatgaggct

SEQ ID NO: 3545 - DNA, 146 bp, Artificial Sequence
  Bisulfite Padlock Probe
  misc_feature 96, 97, 98, 99, 100, 101: n = A,T,C or G
gactggaagagcactgttattctcgactccctaactacgcgcgatacgttggaggctcatcgttcctattcaggcagatgttatcgaggtccgacnnnnnnccataaactcaaacgcgctcctaccgatcggatacgcatgaggct

SEQ ID NO: 3546 - DNA, 146 bp, Artificial Sequence
  Bisulfite Padlock Probe
  misc_feature 95, 96, 97, 98, 99, 100: n = A,T,C or G
gactggaagagcactgttatttaaaccccaaaaatttacctaattagttggaggctcatcgttcctattcaggcagatgttatcgaggtccgacnnnnnnaaaacccattaaccactatacttcccgatcggatacgcatgaggct

SEQ ID NO: 3547 - DNA, 146 bp, Artificial Sequence
  Bisulfite Padlock Probe
  misc_feature 95, 96, 97, 98, 99, 100: n = A,T,C or G
gactggaagagcactgttatttaaaccccaaaaatttacctaattagttggaggctcatcgttcctattcaggcagatgttatcgaggtccgacnnnnnnaaaacccattaaccgctatacttcccgatcggatacgcatgaggct

SEQ ID NO: 3548 - DNA, 146 bp, Artificial Sequence
  Bisulfite Padlock Probe
  misc_feature 93, 94, 95, 96, 97, 98: n = A,T,C or G
gactggaagagcactgttatttaaactttctctacactcaaaaagttggaggctcatcgttcctattcaggcagatgttatcgaggtccgacnnnnnnactaacctacttaacctctcaatctatcgatcggatacgcatgaggct

SEQ ID NO: 3549 - DNA, 146 bp, Artificial Sequence
  Bisulfite Padlock Probe
  misc_feature 93, 94, 95, 96, 97, 98: n = A,T,C or G
gactggaagagcactgttatttaaactttctctacactcgaaaagttggaggctcatcgttcctattcaggcagatgttatcgaggtccgacnnnnnnactaacctacttaacctctcaatctatcgatcggatacgcatgaggct

SEQ ID NO: 3550 - DNA, 146 bp, Artificial Sequence
  Bisulfite Padlock Probe
  misc_feature 96, 97, 98, 99, 100, 101: n = A,T,C or G
gactggaagagcactgttatttactcctatttaccacttctactactgttggaggctcatcgttcctattcaggcagatgttatcgaggtccgacnnnnnnaccccgaccaaaaaatccctaaaaagatcggatacgcatgaggct

SEQ ID NO: 3551 - DNA, 146 bp, Artificial Sequence
  Bisulfite Padlock Probe
  misc_feature 96, 97, 98, 99, 100, 101: n = A,T,C or G
gactggaagagcactgttatttactcctatttaccgcttctactactgttggaggctcatcgttcctattcaggcagatgttatcgaggtccgacnnnnnnaccccgaccgaaaaatccctaaaaagatcggatacgcatgaggct

SEQ ID NO: 3552 - DNA, 146 bp, Artificial Sequence
  Bisulfite Padlock Probe
  misc_feature 92, 93, 94, 95, 96, 97: n = A,T,C or G
gactggaagagcactgttatttactctcgcaacatccaaaaaagttggaggctcatcgttcctattcaggcagatgttatcgaggtccgacnnnnnnctcacaccgtacccaaaaacgaacaaaaagatcggatacgcatgaggct

SEQ ID NO: 3553 - DNA, 146 bp, Artificial Sequence
  Bisulfite Padlock Probe
  misc_feature 92, 93, 94, 95, 96, 97: n = A,T,C or G
gactggaagagcactgttatttactctcgcaacatccgaaaaagttggaggctcatcgttcctattcaggcagatgttatcgaggtccgacnnnnnnctcacaccgtacccaaaaacgaacgaaaagatcggatacgcatgaggct

SEQ ID NO: 3554 - DNA, 146 bp, Artificial Sequence
  Bisulfite Padlock Probe
  misc_feature 93, 94, 95, 96, 97, 98: n = A,T,C or G
gactggaagagcactgttatttcaatttcaaccttatttcccttgttggaggctcatcgttcctattcaggcagatgttatcgaggtccgacnnnnnnactaaaaccccaatactcccaactaattgatcggatacgcatgaggct

SEQ ID NO: 3555 - DNA, 146 bp, Artificial Sequence
  Bisulfite Padlock Probe
  misc_feature 96, 97, 98, 99, 100, 101: n = A,T,C or G
gactggaagagcactgttatttccaaacacctcaaccctaacaaaaagttggaggctcatcgttcctattcaggcagatgttatcgaggtccgacnnnnnncctccccctctaaacctccaaaaacgatcggatacgcatgaggct

SEQ ID NO: 3556 - DNA, 146 bp, Artificial Sequence
  Bisulfite Padlock Probe
  misc_feature 93, 94, 95, 96, 97, 98: n = A,T,C or G
gactggaagagcactgttatttcctaaatctctaaacactaaaagttggaggctcatcgttcctattcaggcagatgttatcgaggtccgacnnnnnncaaatataaattaccctccgcccaccacgatcggatacgcatgaggct

SEQ ID NO: 3557 - DNA, 146 bp, Artificial Sequence
  Bisulfite Padlock Probe
  misc_feature 93, 94, 95, 96, 97, 98: n = A,T,C or G
gactggaagagcactgttatttcctaaatctctaaacactaaaagttggaggctcatcgttcctattcaggcagatgttatcgaggtccgacnnnnnncaaatataaattaccctccgcccaccgcgatcggatacgcatgaggct

SEQ ID NO: 3558 - DNA, 146 bp, Artificial Sequence
  Bisulfite Padlock Probe
  misc_feature 92, 93, 94, 95, 96, 97: n = A,T,C or G
gactggaagagcactgttatttcctcctcctcctcctcctcccgttggaggctcatcgttcctattcaggcagatgttatcgaggtccgacnnnnnnactactttaaaccactaaacactcaacttgatcggatacgcatgaggct

SEQ ID NO: 3559 - DNA, 146 bp, Artificial Sequence
  Bisulfite Padlock Probe
  misc_feature 92, 93, 94, 95, 96, 97: n = A,T,C or G
gactggaagagcactgttatttcctcctcctcctcctcctcccgttggaggctcatcgttcctattcaggcagatgttatcgaggtccgacnnnnnnactactttaaaccgctaaacactcaacttgatcggatacgcatgaggct

SEQ ID NO: 3560 - DNA, 146 bp, Artificial Sequence
  Bisulfite Padlock Probe
  misc_feature 93, 94, 95, 96, 97, 98: n = A,T,C or G
gactggaagagcactgttatttcgatttcaaccttatttcccttgttggaggctcatcgttcctattcaggcagatgttatcgaggtccgacnnnnnnactaaaaccccaatactcccaactaattgatcggatacgcatgaggct

SEQ ID NO: 3561 - DNA, 146 bp, Artificial Sequence
  Bisulfite Padlock Probe
  misc_feature 92, 93, 94, 95, 96, 97: n = A,T,C or G
gactggaagagcactgttattttaataaatcgttattaccaacgttggaggctcatcgttcctattcaggcagatgttatcgaggtccgacnnnnnnactacataaaccctactcccccaaaacccgatcggatacgcatgaggct

SEQ ID NO: 3562 - DNA, 146 bp, Artificial Sequence
  Bisulfite Padlock Probe
  misc_feature 92, 93, 94, 95, 96, 97: n = A,T,C or G
gactggaagagcactgttattttaataaatcgttattaccgacgttggaggctcatcgttcctattcaggcagatgttatcgaggtccgacnnnnnnactacataaaccctactcccccaaaacccgatcggatacgcatgaggct

SEQ ID NO: 3563 - DNA, 146 bp, Artificial Sequence
  Bisulfite Padlock Probe
  misc_feature 92, 93, 94, 95, 96, 97: n = A,T,C or G
gactggaagagcactgttattttcttttcttctcctttcccccgttggaggctcatcgttcctattcaggcagatgttatcgaggtccgacnnnnnnccacctccctacgcaaatacaaaactaccgatcggatacgcatgaggct

SEQ ID NO: 3564 - DNA, 146 bp, Artificial Sequence
  Bisulfite Padlock Probe
  misc_feature 92, 93, 94, 95, 96, 97: n = A,T,C or G
gactggaagagcactgttattttcttttcttctcctttcccccgttggaggctcatcgttcctattcaggcagatgttatcgaggtccgacnnnnnnccacctccctacgcaaatacgaaactaccgatcggatacgcatgaggct

SEQ ID NO: 3565 - DNA, 146 bp, Artificial Sequence
  Bisulfite Padlock Probe
  misc_feature 92, 93, 94, 95, 96, 97: n = A,T,C or G
gactggaagagcactgttatttttaccccgacccattctctccgttggaggctcatcgttcctattcaggcagatgttatcgaggtccgacnnnnnnaataactaacactttaaaaacctcaattagatcggatacgcatgaggct

SEQ ID NO: 3566 - DNA, 146 bp, Artificial Sequence
  Bisulfite Padlock Probe
  misc_feature 92, 93, 94, 95, 96, 97: n = A,T,C or G
gactggaagagcactgttatttttaccccgacccgttctctccgttggaggctcatcgttcctattcaggcagatgttatcgaggtccgacnnnnnnaataactaacgctttaaaaacctcaattagatcggatacgcatgaggct

SEQ ID NO: 3567 - DNA, 146 bp, Artificial Sequence
  Bisulfite Padlock Probe
  misc_feature 95, 96, 97, 98, 99, 100: n = A,T,C or G
gactggaagagcactgttcaaaaacaaaacctaaaaacatctaaaagttggaggctcatcgttcctattcaggcagatgttatcgaggtccgacnnnnnncaaaaataaaaacacaaattaaaaacgatcggatacgcatgaggct

SEQ ID NO: 3568 - DNA, 146 bp, Artificial Sequence
  Bisulfite Padlock Probe
  misc_feature 95, 96, 97, 98, 99, 100: n = A,T,C or G
gactggaagagcactgttcaaaaacaaaacctaaaaacatctaaaagttggaggctcatcgttcctattcaggcagatgttatcgaggtccgacnnnnnncaaaaataaaaacacgaattaaaaacgatcggatacgcatgaggct

SEQ ID NO: 3569 - DNA, 146 bp, Artificial Sequence
  Bisulfite Padlock Probe
  misc_feature 94, 95, 96, 97, 98, 99: n = A,T,C or G
gactggaagagcactgttcaaaaacaaaatatctattattattacgttggaggctcatcgttcctattcaggcagatgttatcgaggtccgacnnnnnnaaaaacctcacttcccccactacccacgatcggatacgcatgaggct

SEQ ID NO: 3570 - DNA, 146 bp, Artificial Sequence
  Bisulfite Padlock Probe
  misc_feature 96, 97, 98, 99, 100, 101: n = A,T,C or G
gactggaagagcactgttcaaaaacaaatcctactctatctaccccagttggaggctcatcgttcctattcaggcagatgttatcgaggtccgacnnnnnnattactataaatatctcactcctccgatcggatacgcatgaggct

SEQ ID NO: 3571 - DNA, 146 bp, Artificial Sequence
  Bisulfite Padlock Probe
  misc_feature 96, 97, 98, 99, 100, 101: n = A,T,C or G
gactggaagagcactgttcaaaaacaaatcctactctatctaccccagttggaggctcatcgttcctattcaggcagatgttatcgaggtccgacnnnnnnattactataaatatctcgctcctccgatcggatacgcatgaggct

SEQ ID NO: 3572 - DNA, 146 bp, Artificial Sequence
  Bisulfite Padlock Probe
  misc_feature 93, 94, 95, 96, 97, 98: n = A,T,C or G
gactggaagagcactgttcaaaaacccacccaaataaaaataaagttggaggctcatcgttcctattcaggcagatgttatcgaggtccgacnnnnnnaaatcaaaaactaaccgaaatccacaccgatcggatacgcatgaggct

SEQ ID NO: 3573 - DNA, 146 bp, Artificial Sequence
  Bisulfite Padlock Probe
  misc_feature 93, 94, 95, 96, 97, 98: n = A,T,C or G
gactggaagagcactgttcaaaaacccacccaaataaaaataaagttggaggctcatcgttcctattcaggcagatgttatcgaggtccgacnnnnnnaaatcaaaaactaaccgaaatccgcaccgatcggatacgcatgaggct

SEQ ID NO: 3574 - DNA, 146 bp, Artificial Sequence
  Bisulfite Padlock Probe
  misc_feature 92, 93, 94, 95, 96, 97: n = A,T,C or G
gactggaagagcactgttcaaaaaccgaaaactctaaaaacaagttggaggctcatcgttcctattcaggcagatgttatcgaggtccgacnnnnnnctcctccgaaaaacgactcactctctaaagatcggatacgcatgaggct

SEQ ID NO: 3575 - DNA, 146 bp, Artificial Sequence
  Bisulfite Padlock Probe
  misc_feature 92, 93, 94, 95, 96, 97: n = A,T,C or G
gactggaagagcactgttcaaaaaccgaaaactctaaaaacgagttggaggctcatcgttcctattcaggcagatgttatcgaggtccgacnnnnnnctcctccgaaaaacgactcgctctctaaagatcggatacgcatgaggct

SEQ ID NO: 3576 - DNA, 146 bp, Artificial Sequence
  Bisulfite Padlock Probe
  misc_feature 96, 97, 98, 99, 100, 101: n = A,T,C or G
gactggaagagcactgttcaaaaacctatacctttccaactcaaaaagttggaggctcatcgttcctattcaggcagatgttatcgaggtccgacnnnnnnaaaaaccttaacctaaacaaataacgatcggatacgcatgaggct

SEQ ID NO: 3577 - DNA, 146 bp, Artificial Sequence
  Bisulfite Padlock Probe
  misc_feature 96, 97, 98, 99, 100, 101: n = A,T,C or G
gactggaagagcactgttcaaaaacctatacctttccgactcaaaaagttggaggctcatcgttcctattcaggcagatgttatcgaggtccgacnnnnnnaaaaaccttaacctaaacgaataacgatcggatacgcatgaggct

SEQ ID NO: 3578 - DNA, 146 bp, Artificial Sequence
  Bisulfite Padlock Probe
  misc_feature 92, 93, 94, 95, 96, 97: n = A,T,C or G
gactggaagagcactgttcaaaaaccttccccaaacaaaacccgttggaggctcatcgttcctattcaggcagatgttatcgaggtccgacnnnnnnaatcccccacatcacaaaaacctccaatagatcggatacgcatgaggct

SEQ ID NO: 3579 - DNA, 146 bp, Artificial Sequence
  Bisulfite Padlock Probe
  misc_feature 92, 93, 94, 95, 96, 97: n = A,T,C or G
gactggaagagcactgttcaaaaaccttccccaaacaaaacccgttggaggctcatcgttcctattcaggcagatgttatcgaggtccgacnnnnnnaatcccccacatcgcaaaaacctccaatagatcggatacgcatgaggct

SEQ ID NO: 3580 - DNA, 146 bp, Artificial Sequence
  Bisulfite Padlock Probe
  misc_feature 92, 93, 94, 95, 96, 97: n = A,T,C or G
gactggaagagcactgttcaaaaaccttccccacccccaaatagttggaggctcatcgttcctattcaggcagatgttatcgaggtccgacnnnnnnaacgaccaaacaataactcgcaaaattccgatcggatacgcatgaggct

SEQ ID NO: 3581 - DNA, 146 bp, Artificial Sequence
  Bisulfite Padlock Probe
  misc_feature 92, 93, 94, 95, 96, 97: n = A,T,C or G
gactggaagagcactgttcaaaaaccttccccacccccgaatagttggaggctcatcgttcctattcaggcagatgttatcgaggtccgacnnnnnnaacgaccaaacaataactcgcgaaattccgatcggatacgcatgaggct

SEQ ID NO: 3582 - DNA, 146 bp, Artificial Sequence
  Bisulfite Padlock Probe
  misc_feature 92, 93, 94, 95, 96, 97: n = A,T,C or G
gactggaagagcactgttcaaaaacgaaaccgaaaccacttccgttggaggctcatcgttcctattcaggcagatgttatcgaggtccgacnnnnnngaatacttcttatacaccaaataaacctcgatcggatacgcatgaggct

SEQ ID NO: 3583 - DNA, 146 bp, Artificial Sequence
  Bisulfite Padlock Probe
  misc_feature 92, 93, 94, 95, 96, 97: n = A,T,C or G
gactggaagagcactgttcaaaaacgaaaccgaaaccgcttccgttggaggctcatcgttcctattcaggcagatgttatcgaggtccgacnnnnnngaatacttcttatacgccaaataaacctcgatcggatacgcatgaggct

SEQ ID NO: 3584 - DNA, 146 bp, Artificial Sequence
  Bisulfite Padlock Probe
  misc_feature 96, 97, 98, 99, 100, 101: n = A,T,C or G
gactggaagagcactgttcaaaaacgaataatacccacatacccccagttggaggctcatcgttcctattcaggcagatgttatcgaggtccgacnnnnnnaaaaacgaccccaaacaactaacccgatcggatacgcatgaggct

SEQ ID NO: 3585 - DNA, 146 bp, Artificial Sequence
  Bisulfite Padlock Probe
  misc_feature 96, 97, 98, 99, 100, 101: n = A,T,C or G
gactggaagagcactgttcaaaaacgaataatacccgcatacccccagttggaggctcatcgttcctattcaggcagatgttatcgaggtccgacnnnnnnaaaaacgaccccaaacgactaacccgatcggatacgcatgaggct

SEQ ID NO: 3586 - DNA, 146 bp, Artificial Sequence
  Bisulfite Padlock Probe
  misc_feature 95, 96, 97, 98, 99, 100: n = A,T,C or G
gactggaagagcactgttcaaaaacgcgaaacaaaaaatatccctagttggaggctcatcgttcctattcaggcagatgttatcgaggtccgacnnnnnnctctaaacaaaaactaatccccaaacgatcggatacgcatgaggct

SEQ ID NO: 3587 - DNA, 146 bp, Artificial Sequence
  Bisulfite Padlock Probe
  misc_feature 95, 96, 97, 98, 99, 100: n = A,T,C or G
gactggaagagcactgttcaaaaacgcgaaacgaaaaatatccctagttggaggctcatcgttcctattcaggcagatgttatcgaggtccgacnnnnnnctctaaacaaaaactaatccccaaacgatcggatacgcatgaggct

SEQ ID NO: 3588 - DNA, 146 bp, Artificial Sequence
  Bisulfite Padlock Probe
  misc_feature 92, 93, 94, 95, 96, 97: n = A,T,C or G
gactggaagagcactgttcaaaaacgcgaaacgaacacaaaaagttggaggctcatcgttcctattcaggcagatgttatcgaggtccgacnnnnnncaaaatcacgatcaccgaaaacgccaaacgatcggatacgcatgaggct

SEQ ID NO: 3589 - DNA, 146 bp, Artificial Sequence
  Bisulfite Padlock Probe
  misc_feature 92, 93, 94, 95, 96, 97: n = A,T,C or G
gactggaagagcactgttcaaaaacgcgaaacgaacgcaaaaagttggaggctcatcgttcctattcaggcagatgttatcgaggtccgacnnnnnncaaaatcacgatcaccgaaaacgccgaacgatcggatacgcatgaggct

SEQ ID NO: 3590 - DNA, 146 bp, Artificial Sequence
  Bisulfite Padlock Probe
  misc_feature 92, 93, 94, 95, 96, 97: n = A,T,C or G
gactggaagagcactgttcaaaaacgctaacaaccccaaccccgttggaggctcatcgttcctattcaggcagatgttatcgaggtccgacnnnnnnccttcctcctcctcctttatctttaaaacgatcggatacgcatgaggct

SEQ ID NO: 3591 - DNA, 146 bp, Artificial Sequence
  Bisulfite Padlock Probe
  misc_feature 92, 93, 94, 95, 96, 97: n = A,T,C or G
gactggaagagcactgttcaaaaacgctaacaaccccgaccccgttggaggctcatcgttcctattcaggcagatgttatcgaggtccgacnnnnnnccttcctcctcctcctttatctttaaaacgatcggatacgcatgaggct

SEQ ID NO: 3592 - DNA, 146 bp, Artificial Sequence
  Bisulfite Padlock Probe
  misc_feature 94, 95, 96, 97, 98, 99: n = A,T,C or G
gactggaagagcactgttcaaaaactcgccctcctccacaactttgttggaggctcatcgttcctattcaggcagatgttatcgaggtccgacnnnnnnaaacctaaaccaattcctactaaaaccgatcggatacgcatgaggct

SEQ ID NO: 3593 - DNA, 146 bp, Artificial Sequence
  Bisulfite Padlock Probe
  misc_feature 94, 95, 96, 97, 98, 99: n = A,T,C or G
gactggaagagcactgttcaaaaactcgccctcctccacgactttgttggaggctcatcgttcctattcaggcagatgttatcgaggtccgacnnnnnnaaacctaaaccgattcctactaaaaccgatcggatacgcatgaggct

SEQ ID NO: 3594 - DNA, 146 bp, Artificial Sequence
  Bisulfite Padlock Probe
  misc_feature 94, 95, 96, 97, 98, 99: n = A,T,C or G
gactggaagagcactgttcaaaaactctccaaccctcaactcccagttggaggctcatcgttcctattcaggcagatgttatcgaggtccgacnnnnnnaaaaatcttaacctaaacaaatcaaacgatcggatacgcatgaggct

SEQ ID NO: 3595 - DNA, 146 bp, Artificial Sequence
  Bisulfite Padlock Probe
  misc_feature 94, 95, 96, 97, 98, 99: n = A,T,C or G
gactggaagagcactgttcaaaaactctccaaccctcaactcccggttggaggctcatcgttcctattcaggcagatgttatcgaggtccgacnnnnnnaaaaatcttaacctaaacaaatcaaacgatcggatacgcatgaggct

SEQ ID NO: 3596 - DNA, 146 bp, Artificial Sequence
  Bisulfite Padlock Probe
  misc_feature 95, 96, 97, 98, 99, 100: n = A,T,C or G
gactggaagagcactgttcaaaaactttttaacatcaccaaataaagttggaggctcatcgttcctattcaggcagatgttatcgaggtccgacnnnnnnaaaaacaataaaactaaccaaaccccgatcggatacgcatgaggct

SEQ ID NO: 3597 - DNA, 146 bp, Artificial Sequence
  Bisulfite Padlock Probe
  misc_feature 95, 96, 97, 98, 99, 100: n = A,T,C or G
gactggaagagcactgttcaaaaactttttaacgtcaccaaataaagttggaggctcatcgttcctattcaggcagatgttatcgaggtccgacnnnnnnaaaaacaataaaactaaccgaaccccgatcggatacgcatgaggct

SEQ ID NO: 3598 - DNA, 146 bp, Artificial Sequence
  Bisulfite Padlock Probe
  misc_feature 92, 93, 94, 95, 96, 97: n = A,T,C or G
gactggaagagcactgttcaaaaataaaaacactatttataaagttggaggctcatcgttcctattcaggcagatgttatcgaggtccgacnnnnnnactcaaaaccaaaaactaaaaacctaaaagatcggatacgcatgaggct

SEQ ID NO: 3599 - DNA, 146 bp, Artificial Sequence
  Bisulfite Padlock Probe
  misc_feature 94, 95, 96, 97, 98, 99: n = A,T,C or G
gactggaagagcactgttcaaaaataaaaaccacattattcccacgttggaggctcatcgttcctattcaggcagatgttatcgaggtccgacnnnnnntctaaccactcaataaccaaccaaaaagatcggatacgcatgaggct

SEQ ID NO: 3600 - DNA, 146 bp, Artificial Sequence
  Bisulfite Padlock Probe
  misc_feature 92, 93, 94, 95, 96, 97: n = A,T,C or G
gactggaagagcactgttcaaaaataaaaacgctatttataaagttggaggctcatcgttcctattcaggcagatgttatcgaggtccgacnnnnnnactcaaaaccgaaaactaaaaacctaaaagatcggatacgcatgaggct

SEQ ID NO: 3601 - DNA, 146 bp, Artificial Sequence
  Bisulfite Padlock Probe
  misc_feature 96, 97, 98, 99, 100, 101: n = A,T,C or G
gactggaagagcactgttcaaaaataaacgctcgaaccgaacccaatgttggaggctcatcgttcctattcaggcagatgttatcgaggtccgacnnnnnncccgcaacctcaacgaaaccaaatcgatcggatacgcatgaggct

SEQ ID NO: 3602 - DNA, 146 bp, Artificial Sequence
  Bisulfite Padlock Probe
  misc_feature 96, 97, 98, 99, 100, 101: n = A,T,C or G
gactggaagagcactgttcaaaaataaacgctcgaaccgaacccgatgttggaggctcatcgttcctattcaggcagatgttatcgaggtccgacnnnnnncccgcaacctcaacgaaaccgaatcgatcggatacgcatgaggct

SEQ ID NO: 3603 - DNA, 146 bp, Artificial Sequence
  Bisulfite Padlock Probe
  misc_feature 96, 97, 98, 99, 100, 101: n = A,T,C or G
gactggaagagcactgttcaaaaatcacctaaacaaaatataaacccgttggaggctcatcgttcctattcaggcagatgttatcgaggtccgacnnnnnnccttctatcccatttaatctccttagatcggatacgcatgaggct

SEQ ID NO: 3604 - DNA, 146 bp, Artificial Sequence
  Bisulfite Padlock Probe
  misc_feature 95, 96, 97, 98, 99, 100: n = A,T,C or G
gactggaagagcactgttcaaaaatccccattaaaaatacctcctcgttggaggctcatcgttcctattcaggcagatgttatcgaggtccgacnnnnnncccaaaactccactcctaaaaactccgatcggatacgcatgaggct

SEQ ID NO: 3605 - DNA, 146 bp, Artificial Sequence
  Bisulfite Padlock Probe
  misc_feature 93, 94, 95, 96, 97, 98: n = A,T,C or G
gactggaagagcactgttcaaaaatccccgaacaccctaaaaacgttggaggctcatcgttcctattcaggcagatgttatcgaggtccgacnnnnnnacctcctctttatctttaaaactcccccgatcggatacgcatgaggct

SEQ ID NO: 3606 - DNA, 146 bp, Artificial Sequence
  Bisulfite Padlock Probe
  misc_feature 93, 94, 95, 96, 97, 98: n = A,T,C or G
gactggaagagcactgttcaaaaatccccgaacgccctaaaaacgttggaggctcatcgttcctattcaggcagatgttatcgaggtccgacnnnnnnacctcctctttatctttaaaactcccccgatcggatacgcatgaggct

SEQ ID NO: 3607 - DNA, 146 bp, Artificial Sequence
  Bisulfite Padlock Probe
  misc_feature 95, 96, 97, 98, 99, 100: n = A,T,C or G
gactggaagagcactgttcaaaaatccccgttaaaaatacctcctcgttggaggctcatcgttcctattcaggcagatgttatcgaggtccgacnnnnnncccgaaactccactcctaaaaactccgatcggatacgcatgaggct

SEQ ID NO: 3608 - DNA, 146 bp, Artificial Sequence
  Bisulfite Padlock Probe
  misc_feature 96, 97, 98, 99, 100, 101: n = A,T,C or G
gactggaagagcactgttcaaaaatcgcctaaacaaaatataaacccgttggaggctcatcgttcctattcaggcagatgttatcgaggtccgacnnnnnnccttctatcccatttaatctccttagatcggatacgcatgaggct

SEQ ID NO: 3609 - DNA, 146 bp, Artificial Sequence
  Bisulfite Padlock Probe
  misc_feature 92, 93, 94, 95, 96, 97: n = A,T,C or G
gactggaagagcactgttcaaaaattaaaactcaaaaactaacgttggaggctcatcgttcctattcaggcagatgttatcgaggtccgacnnnnnnatataataaatcctctcactaaataaaacgatcggatacgcatgaggct

SEQ ID NO: 3610 - DNA, 146 bp, Artificial Sequence
  Bisulfite Padlock Probe
  misc_feature 92, 93, 94, 95, 96, 97: n = A,T,C or G
gactggaagagcactgttcaaaaattaaaactcgaaaactaacgttggaggctcatcgttcctattcaggcagatgttatcgaggtccgacnnnnnnatataataaatcctctcgctaaataaaacgatcggatacgcatgaggct

SEQ ID NO: 3611 - DNA, 146 bp, Artificial Sequence
  Bisulfite Padlock Probe
  misc_feature 93, 94, 95, 96, 97, 98: n = A,T,C or G
gactggaagagcactgttcaaaaattcctctattactctaaaaagttggaggctcatcgttcctattcaggcagatgttatcgaggtccgacnnnnnnaaaaacccgacttcaacaacacttaacagatcggatacgcatgaggct

SEQ ID NO: 3612 - DNA, 146 bp, Artificial Sequence
  Bisulfite Padlock Probe
  misc_feature 96, 97, 98, 99, 100, 101: n = A,T,C or G
gactggaagagcactgttcaaaaattccttaaacattttaacttctagttggaggctcatcgttcctattcaggcagatgttatcgaggtccgacnnnnnnaaacccaacctccccaaacccaatcgatcggatacgcatgaggct

SEQ ID NO: 3613 - DNA, 146 bp, Artificial Sequence
  Bisulfite Padlock Probe
  misc_feature 96, 97, 98, 99, 100, 101: n = A,T,C or G
gactggaagagcactgttcaaaaattccttaaacattttaacttctagttggaggctcatcgttcctattcaggcagatgttatcgaggtccgacnnnnnnaaacccgacctccccaaacccaatcgatcggatacgcatgaggct

SEQ ID NO: 3614 - DNA, 146 bp, Artificial Sequence
  Bisulfite Padlock Probe
  misc_feature 95, 96, 97, 98, 99, 100: n = A,T,C or G
gactggaagagcactgttcaaaacaaaaacccactaaaccttaaaagttggaggctcatcgttcctattcaggcagatgttatcgaggtccgacnnnnnnccctaatccaacaaaactaatatcccgatcggatacgcatgaggct

SEQ ID NO: 3615 - DNA, 146 bp, Artificial Sequence
  Bisulfite Padlock Probe
  misc_feature 95, 96, 97, 98, 99, 100: n = A,T,C or G
gactggaagagcactgttcaaaacaaaaacccgctaaaccttaaaagttggaggctcatcgttcctattcaggcagatgttatcgaggtccgacnnnnnnccctaatccaacaaaactaatatcccgatcggatacgcatgaggct

SEQ ID NO: 3616 - DNA, 146 bp, Artificial Sequence
  Bisulfite Padlock Probe
  misc_feature 92, 93, 94, 95, 96, 97: n = A,T,C or G
gactggaagagcactgttcaaaacaaacaccttactccaccccgttggaggctcatcgttcctattcaggcagatgttatcgaggtccgacnnnnnnccacccctaactacaaaccaaccctctacgatcggatacgcatgaggct

SEQ ID NO: 3617 - DNA, 146 bp, Artificial Sequence
  Bisulfite Padlock Probe
  misc_feature 92, 93, 94, 95, 96, 97: n = A,T,C or G
gactggaagagcactgttcaaaacaaacgccttactccaccccgttggaggctcatcgttcctattcaggcagatgttatcgaggtccgacnnnnnnccacccctaactacaaaccaaccctctacgatcggatacgcatgaggct

SEQ ID NO: 3618 - DNA, 146 bp, Artificial Sequence
  Bisulfite Padlock Probe
  misc_feature 96, 97, 98, 99, 100, 101: n = A,T,C or G
gactggaagagcactgttcaaaacaacaaatctttaaaaccccctccgttggaggctcatcgttcctattcaggcagatgttatcgaggtccgacnnnnnnataacctaaaataccgcacatctccgatcggatacgcatgaggct

SEQ ID NO: 3619 - DNA, 146 bp, Artificial Sequence
  Bisulfite Padlock Probe
  misc_feature 96, 97, 98, 99, 100, 101: n = A,T,C or G
gactggaagagcactgttcaaaacaacaaatctttaaaaccccctccgttggaggctcatcgttcctattcaggcagatgttatcgaggtccgacnnnnnnataacctaaaataccgcgcatctccgatcggatacgcatgaggct

SEQ ID NO: 3620 - DNA, 146 bp, Artificial Sequence
  Bisulfite Padlock Probe
  misc_feature 96, 97, 98, 99, 100, 101: n = A,T,C or G
gactggaagagcactgttcaaaacaccttaatctaccctaccaatcagttggaggctcatcgttcctattcaggcagatgttatcgaggtccgacnnnnnncccaacaccaaactatccaaactaagatcggatacgcatgaggct

SEQ ID NO: 3621 - DNA, 146 bp, Artificial Sequence
  Bisulfite Padlock Probe
  misc_feature 96, 97, 98, 99, 100, 101: n = A,T,C or G
gactggaagagcactgttcaaaacaccttaatctaccctaccaatcagttggaggctcatcgttcctattcaggcagatgttatcgaggtccgacnnnnnncccgacaccaaactatccaaactaagatcggatacgcatgaggct

SEQ ID NO: 3622 - DNA, 146 bp, Artificial Sequence
  Bisulfite Padlock Probe
  misc_feature 95, 96, 97, 98, 99, 100: n = A,T,C or G
gactggaagagcactgttcaaaacataaaataatacaaactaaaaagttggaggctcatcgttcctattcaggcagatgttatcgaggtccgacnnnnnnaaaccttaaacgcaacacctccatacgatcggatacgcatgaggct

SEQ ID NO: 3623 - DNA, 146 bp, Artificial Sequence
  Bisulfite Padlock Probe
  misc_feature 95, 96, 97, 98, 99, 100: n = A,T,C or G
gactggaagagcactgttcaaaacataaaataatacgaactaaaaagttggaggctcatcgttcctattcaggcagatgttatcgaggtccgacnnnnnnaaaccttaaacgcaacgcctccatacgatcggatacgcatgaggct

SEQ ID NO: 3624 - DNA, 146 bp, Artificial Sequence
  Bisulfite Padlock Probe
  misc_feature 94, 95, 96, 97, 98, 99: n = A,T,C or G
gactggaagagcactgttcaaaaccaaaaccttaaaccaacacacgttggaggctcatcgttcctattcaggcagatgttatcgaggtccgacnnnnnnctcctacccctcccaaccttccaaaacgatcggatacgcatgaggct

SEQ ID NO: 3625 - DNA, 146 bp, Artificial Sequence
  Bisulfite Padlock Probe
  misc_feature 96, 97, 98, 99, 100, 101: n = A,T,C or G
gactggaagagcactgttcaaaaccaaataaacttcaccttcttcatgttggaggctcatcgttcctattcaggcagatgttatcgaggtccgacnnnnnnacgctcgaacacacacactttcaacgatcggatacgcatgaggct

SEQ ID NO: 3626 - DNA, 146 bp, Artificial Sequence
  Bisulfite Padlock Probe
  misc_feature 96, 97, 98, 99, 100, 101: n = A,T,C or G
gactggaagagcactgttcaaaaccaaataaacttcgccttcttcatgttggaggctcatcgttcctattcaggcagatgttatcgaggtccgacnnnnnnacgctcgaacacgcacactttcaacgatcggatacgcatgaggct

SEQ ID NO: 3627 - DNA, 146 bp, Artificial Sequence
  Bisulfite Padlock Probe
  misc_feature 95, 96, 97, 98, 99, 100: n = A,T,C or G
gactggaagagcactgttcaaaaccaacgacgccataatccaaaccgttggaggctcatcgttcctattcaggcagatgttatcgaggtccgacnnnnnnaaaaaccccgaccactccccaaaatagatcggatacgcatgaggct

SEQ ID NO: 3628 - DNA, 146 bp, Artificial Sequence
  Bisulfite Padlock Probe
  misc_feature 95, 96, 97, 98, 99, 100: n = A,T,C or G
gactggaagagcactgttcaaaaccaacgacgccgtaatccaaaccgttggaggctcatcgttcctattcaggcagatgttatcgaggtccgacnnnnnnaaaaaccccgaccgctccccaaaatagatcggatacgcatgaggct

SEQ ID NO: 3629 - DNA, 146 bp, Artificial Sequence
  Bisulfite Padlock Probe
  misc_feature 96, 97, 98, 99, 100, 101: n = A,T,C or G
gactggaagagcactgttcaaaaccccaaaactttatacaattaatagttggaggctcatcgttcctattcaggcagatgttatcgaggtccgacnnnnnnccaacaaattaaaacacaaaacaacgatcggatacgcatgaggct

SEQ ID NO: 3630 - DNA, 146 bp, Artificial Sequence
  Bisulfite Padlock Probe
  misc_feature 96, 97, 98, 99, 100, 101: n = A,T,C or G
gactggaagagcactgttcaaaaccccaaaactttatacaattaatagttggaggctcatcgttcctattcaggcagatgttatcgaggtccgacnnnnnnccaacaaattaaaacgcaaaacaacgatcggatacgcatgaggct

SEQ ID NO: 3631 - DNA, 146 bp, Artificial Sequence
  Bisulfite Padlock Probe
  misc_feature 92, 93, 94, 95, 96, 97: n = A,T,C or G
gactggaagagcactgttcaaaaccctacaacacacaacaaaagttggaggctcatcgttcctattcaggcagatgttatcgaggtccgacnnnnnntatttaacaatcctataacccctaaacacgatcggatacgcatgaggct

SEQ ID NO: 3632 - DNA, 146 bp, Artificial Sequence
  Bisulfite Padlock Probe
  misc_feature 92, 93, 94, 95, 96, 97: n = A,T,C or G
gactggaagagcactgttcaaaaccctacaacacacgacaaaagttggaggctcatcgttcctattcaggcagatgttatcgaggtccgacnnnnnntatttaacaatcctataacccctaaacacgatcggatacgcatgaggct

SEQ ID NO: 3633 - DNA, 146 bp, Artificial Sequence
  Bisulfite Padlock Probe
  misc_feature 92, 93, 94, 95, 96, 97: n = A,T,C or G
gactggaagagcactgttcaaaaccctcgcctacatcctaaacgttggaggctcatcgttcctattcaggcagatgttatcgaggtccgacnnnnnnaaaaaccgaccgaaaactaccaaactcctgatcggatacgcatgaggct

SEQ ID NO: 3634 - DNA, 146 bp, Artificial Sequence
  Bisulfite Padlock Probe
  misc_feature 92, 93, 94, 95, 96, 97: n = A,T,C or G
gactggaagagcactgttcaaaaccctcgcctacgtcctaaacgttggaggctcatcgttcctattcaggcagatgttatcgaggtccgacnnnnnnaaaaaccgaccgaaaactaccgaactcctgatcggatacgcatgaggct

SEQ ID NO: 3635 - DNA, 146 bp, Artificial Sequence
  Bisulfite Padlock Probe
  misc_feature 93, 94, 95, 96, 97, 98: n = A,T,C or G
gactggaagagcactgttcaaaaccgaacaaaaataatatttacgttggaggctcatcgttcctattcaggcagatgttatcgaggtccgacnnnnnntcccaaccctccaaaccctaaacaaatcgatcggatacgcatgaggct

SEQ ID NO: 3636 - DNA, 146 bp, Artificial Sequence
  Bisulfite Padlock Probe
  misc_feature 93, 94, 95, 96, 97, 98: n = A,T,C or G
gactggaagagcactgttcaaaaccgaacgaaaataatatttacgttggaggctcatcgttcctattcaggcagatgttatcgaggtccgacnnnnnntcccaaccctccaaaccctaaacgaatcgatcggatacgcatgaggct

SEQ ID NO: 3637 - DNA, 146 bp, Artificial Sequence
  Bisulfite Padlock Probe
  misc_feature 95, 96, 97, 98, 99, 100: n = A,T,C or G
gactggaagagcactgttcaaaaccgactaaaacaacttaaaccccgttggaggctcatcgttcctattcaggcagatgttatcgaggtccgacnnnnnnaactctaacccccaacctaacttaacgatcggatacgcatgaggct

SEQ ID NO: 3638 - DNA, 146 bp, Artificial Sequence
  Bisulfite Padlock Probe
  misc_feature 95, 96, 97, 98, 99, 100: n = A,T,C or G
gactggaagagcactgttcaaaaccgactaaaacgacttaaaccccgttggaggctcatcgttcctattcaggcagatgttatcgaggtccgacnnnnnnaactctaacccccgacctaacttaacgatcggatacgcatgaggct

SEQ ID NO: 3639 - DNA, 146 bp, Artificial Sequence
  Bisulfite Padlock Probe
  misc_feature 95, 96, 97, 98, 99, 100: n = A,T,C or G
gactggaagagcactgttcaaaaccgttcaataacctatataaaacgttggaggctcatcgttcctattcaggcagatgttatcgaggtccgacnnnnnncaaactacaaataaattacctaactcgatcggatacgcatgaggct

SEQ ID NO: 3640 - DNA, 146 bp, Artificial Sequence
  Bisulfite Padlock Probe
  misc_feature 95, 96, 97, 98, 99, 100: n = A,T,C or G
gactggaagagcactgttcaaaaccgttcgataacctatataaaacgttggaggctcatcgttcctattcaggcagatgttatcgaggtccgacnnnnnncaaactacgaataaattacctaactcgatcggatacgcatgaggct

SEQ ID NO: 3641 - DNA, 146 bp, Artificial Sequence
  Bisulfite Padlock Probe
  misc_feature 94, 95, 96, 97, 98, 99: n = A,T,C or G
gactggaagagcactgttcaaaacctccaaaaactccaacaaaaagttggaggctcatcgttcctattcaggcagatgttatcgaggtccgacnnnnnnaaacgactacaactcaaacacataaccgatcggatacgcatgaggct

SEQ ID NO: 3642 - DNA, 146 bp, Artificial Sequence
  Bisulfite Padlock Probe
  misc_feature 94, 95, 96, 97, 98, 99: n = A,T,C or G
gactggaagagcactgttcaaaacctccaaaaactccaacaaaaagttggaggctcatcgttcctattcaggcagatgttatcgaggtccgacnnnnnnaaacgactacgactcaaacacataaccgatcggatacgcatgaggct

SEQ ID NO: 3643 - DNA, 146 bp, Artificial Sequence
  Bisulfite Padlock Probe
  misc_feature 96, 97, 98, 99, 100, 101: n = A,T,C or G
gactggaagagcactgttcaaaacgaacccaaaaataaatcaaaatcgttggaggctcatcgttcctattcaggcagatgttatcgaggtccgacnnnnnnttactccaacccccatcccaatcccgatcggatacgcatgaggct

SEQ ID NO: 3644 - DNA, 146 bp, Artificial Sequence
  Bisulfite Padlock Probe
  misc_feature 96, 97, 98, 99, 100, 101: n = A,T,C or G
gactggaagagcactgttcaaaacgaacccaaaaataaatcgaaatcgttggaggctcatcgttcctattcaggcagatgttatcgaggtccgacnnnnnnttactccaacccccatcccaatcccgatcggatacgcatgaggct

SEQ ID NO: 3645 - DNA, 146 bp, Artificial Sequence
  Bisulfite Padlock Probe
  misc_feature 92, 93, 94, 95, 96, 97: n = A,T,C or G
gactggaagagcactgttcaaaacgcccaaactacacaaataagttggaggctcatcgttcctattcaggcagatgttatcgaggtccgacnnnnnnacacgacaataatattaatataaataaccgatcggatacgcatgaggct

SEQ ID NO: 3646 - DNA, 146 bp, Artificial Sequence
  Bisulfite Padlock Probe
  misc_feature 92, 93, 94, 95, 96, 97: n = A,T,C or G
gactggaagagcactgttcaaaacgcccaaactacgcaaataagttggaggctcatcgttcctattcaggcagatgttatcgaggtccgacnnnnnnacacgacgataatattaatataaataaccgatcggatacgcatgaggct

SEQ ID NO: 3647 - DNA, 146 bp, Artificial Sequence
  Bisulfite Padlock Probe
  misc_feature 94, 95, 96, 97, 98, 99: n = A,T,C or G
gactggaagagcactgttcaaaacgtaaaaacgcaaatcgccatcgttggaggctcatcgttcctattcaggcagatgttatcgaggtccgacnnnnnncaacgtaccgaaatcgcacataataacgatcggatacgcatgaggct

SEQ ID NO: 3648 - DNA, 146 bp, Artificial Sequence
  Bisulfite Padlock Probe
  misc_feature 94, 95, 96, 97, 98, 99: n = A,T,C or G
gactggaagagcactgttcaaaacgtaaaaacgcaaatcgccgtcgttggaggctcatcgttcctattcaggcagatgttatcgaggtccgacnnnnnncaacgtaccgaaatcgcacgtaataacgatcggatacgcatgaggct

SEQ ID NO: 3649 - DNA, 146 bp, Artificial Sequence
  Bisulfite Padlock Probe
  misc_feature 93, 94, 95, 96, 97, 98: n = A,T,C or G
gactggaagagcactgttcaaaactcgaacaacaacaccttaacgttggaggctcatcgttcctattcaggcagatgttatcgaggtccgacnnnnnntctaataactcccactccacaccttcccgatcggatacgcatgaggct

SEQ ID NO: 3650 - DNA, 146 bp, Artificial Sequence
  Bisulfite Padlock Probe
  misc_feature 93, 94, 95, 96, 97, 98: n = A,T,C or G
gactggaagagcactgttcaaaactcgaacgacaacaccttaacgttggaggctcatcgttcctattcaggcagatgttatcgaggtccgacnnnnnntctaataactcccactccacaccttcccgatcggatacgcatgaggct

SEQ ID NO: 3651 - DNA, 146 bp, Artificial Sequence
  Bisulfite Padlock Probe
  misc_feature 94, 95, 96, 97, 98, 99: n = A,T,C or G
gactggaagagcactgttcaaaataaaacaaaaatccctttactcgttggaggctcatcgttcctattcaggcagatgttatcgaggtccgacnnnnnnattccgaaacgcaaaaccctaaaactagatcggatacgcatgaggct

SEQ ID NO: 3652 - DNA, 146 bp, Artificial Sequence
  Bisulfite Padlock Probe
  misc_feature 94, 95, 96, 97, 98, 99: n = A,T,C or G
gactggaagagcactgttcaaaataaaaccccatctctactaaaagttggaggctcatcgttcctattcaggcagatgttatcgaggtccgacnnnnnnaaaaacatccgctatcactaacaaaaagatcggatacgcatgaggct

SEQ ID NO: 3653 - DNA, 146 bp, Artificial Sequence
  Bisulfite Padlock Probe
  misc_feature 94, 95, 96, 97, 98, 99: n = A,T,C or G
gactggaagagcactgttcaaaataaaaccccatctctactaaaagttggaggctcatcgttcctattcaggcagatgttatcgaggtccgacnnnnnnaaaaacatccgctatcgctaacaaaaagatcggatacgcatgaggct

SEQ ID NO: 3654 - DNA, 146 bp, Artificial Sequence
  Bisulfite Padlock Probe
  misc_feature 94, 95, 96, 97, 98, 99: n = A,T,C or G
gactggaagagcactgttcaaaataaaacgaaaatccctttactcgttggaggctcatcgttcctattcaggcagatgttatcgaggtccgacnnnnnnattccgaaacgcgaaaccctaaaactagatcggatacgcatgaggct

SEQ ID NO: 3655 - DNA, 146 bp, Artificial Sequence
  Bisulfite Padlock Probe
  misc_feature 96, 97, 98, 99, 100, 101: n = A,T,C or G
gactggaagagcactgttcaaaatacgcgcgaccatacaaaaaataagttggaggctcatcgttcctattcaggcagatgttatcgaggtccgacnnnnnnaaaacgtcccatctaaatctaaaaagatcggatacgcatgaggct

SEQ ID NO: 3656 - DNA, 146 bp, Artificial Sequence
  Bisulfite Padlock Probe
  misc_feature 96, 97, 98, 99, 100, 101: n = A,T,C or G
gactggaagagcactgttcaaaatacgcgcgaccatacgaaaaataagttggaggctcatcgttcctattcaggcagatgttatcgaggtccgacnnnnnnaaaacgtcccgtctaaatctaaaaagatcggatacgcatgaggct

SEQ ID NO: 3657 - DNA, 146 bp, Artificial Sequence
  Bisulfite Padlock Probe
  misc_feature 93, 94, 95, 96, 97, 98: n = A,T,C or G
gactggaagagcactgttcaaaatatttacataacactaaccaagttggaggctcatcgttcctattcaggcagatgttatcgaggtccgacnnnnnnaaactccatcaaacactatactaaaaccgatcggatacgcatgaggct

SEQ ID NO: 3658 - DNA, 146 bp, Artificial Sequence
  Bisulfite Padlock Probe
  misc_feature 93, 94, 95, 96, 97, 98: n = A,T,C or G
gactggaagagcactgttcaaaatcaaatttaatttcacaacaagttggaggctcatcgttcctattcaggcagatgttatcgaggtccgacnnnnnncccttccaaataactttcgcatacctaagatcggatacgcatgaggct

SEQ ID NO: 3659 - DNA, 146 bp, Artificial Sequence
  Bisulfite Padlock Probe
  misc_feature 93, 94, 95, 96, 97, 98: n = A,T,C or G
gactggaagagcactgttcaaaatcaaatttaatttcacaacaagttggaggctcatcgttcctattcaggcagatgttatcgaggtccgacnnnnnncccttccaaataactttcgcgtacctaagatcggatacgcatgaggct

SEQ ID NO: 3660 - DNA, 146 bp, Artificial Sequence
  Bisulfite Padlock Probe
  misc_feature 94, 95, 96, 97, 98, 99: n = A,T,C or G
gactggaagagcactgttcaaaatcacacacacacacaaaaccacgttggaggctcatcgttcctattcaggcagatgttatcgaggtccgacnnnnnnaatctccctttctaccactacaaaaacgatcggatacgcatgaggct

SEQ ID NO: 3661 - DNA, 146 bp, Artificial Sequence
  Bisulfite Padlock Probe
  misc_feature 94, 95, 96, 97, 98, 99: n = A,T,C or G
gactggaagagcactgttcaaaatcacacacacacacaaaaccacgttggaggctcatcgttcctattcaggcagatgttatcgaggtccgacnnnnnnaatctccctttctaccgctacaaaaacgatcggatacgcatgaggct

SEQ ID NO: 3662 - DNA, 146 bp, Artificial Sequence
  Bisulfite Padlock Probe
  misc_feature 96, 97, 98, 99, 100, 101: n = A,T,C or G
gactggaagagcactgttcaaaatcattccttacaaaaaactctaaagttggaggctcatcgttcctattcaggcagatgttatcgaggtccgacnnnnnnaaaaacctcgaatacaacccacaccgatcggatacgcatgaggct

SEQ ID NO: 3663 - DNA, 146 bp, Artificial Sequence
  Bisulfite Padlock Probe
  misc_feature 96, 97, 98, 99, 100, 101: n = A,T,C or G
gactggaagagcactgttcaaaatcattccttacgaaaaactctaaagttggaggctcatcgttcctattcaggcagatgttatcgaggtccgacnnnnnnaaaaacctcgaatacaacccgcaccgatcggatacgcatgaggct

SEQ ID NO: 3664 - DNA, 146 bp, Artificial Sequence
  Bisulfite Padlock Probe
  misc_feature 92, 93, 94, 95, 96, 97: n = A,T,C or G
gactggaagagcactgttcaaaatcccccaaacctcaaacctcgttggaggctcatcgttcctattcaggcagatgttatcgaggtccgacnnnnnnccattacaaaacaccaacaacccattaccgatcggatacgcatgaggct

SEQ ID NO: 3665 - DNA, 146 bp, Artificial Sequence
  Bisulfite Padlock Probe
  misc_feature 92, 93, 94, 95, 96, 97: n = A,T,C or G
gactggaagagcactgttcaaaatcccccaaacctcaaacctcgttggaggctcatcgttcctattcaggcagatgttatcgaggtccgacnnnnnnccattacaaaacgccaacaacccattaccgatcggatacgcatgaggct

SEQ ID NO: 3666 - DNA, 146 bp, Artificial Sequence
  Bisulfite Padlock Probe
  misc_feature 92, 93, 94, 95, 96, 97: n = A,T,C or G
gactggaagagcactgttcaaaatcttaaccccttcccaccaagttggaggctcatcgttcctattcaggcagatgttatcgaggtccgacnnnnnnccctactattaaccaaaaataatctcaccgatcggatacgcatgaggct

SEQ ID NO: 3667 - DNA, 146 bp, Artificial Sequence
  Bisulfite Padlock Probe
  misc_feature 92, 93, 94, 95, 96, 97: n = A,T,C or G
gactggaagagcactgttcaaaatcttaaccccttcccgccaagttggaggctcatcgttcctattcaggcagatgttatcgaggtccgacnnnnnnccctactattaaccaaaaataatctcaccgatcggatacgcatgaggct

SEQ ID NO: 3668 - DNA, 146 bp, Artificial Sequence
  Bisulfite Padlock Probe
  misc_feature 94, 95, 96, 97, 98, 99: n = A,T,C or G
gactggaagagcactgttcaaaatttacctcttccttttctctccgttggaggctcatcgttcctattcaggcagatgttatcgaggtccgacnnnnnnataaccataaaatcctctactaaactcgatcggatacgcatgaggct

SEQ ID NO: 3669 - DNA, 146 bp, Artificial Sequence
  Bisulfite Padlock Probe
  misc_feature 95, 96, 97, 98, 99, 100: n = A,T,C or G
gactggaagagcactgttcaaacaaaaactaaaactcttcctaaacgttggaggctcatcgttcctattcaggcagatgttatcgaggtccgacnnnnnnctcgtaaacaacctccaaaaaccaacgatcggatacgcatgaggct

SEQ ID NO: 3670 - DNA, 146 bp, Artificial Sequence
  Bisulfite Padlock Probe
  misc_feature 94, 95, 96, 97, 98, 99: n = A,T,C or G
gactggaagagcactgttcaaacaaaactacaacccccaccttacgttggaggctcatcgttcctattcaggcagatgttatcgaggtccgacnnnnnntaaaaacctccaaccccaactcaaatcgatcggatacgcatgaggct

SEQ ID NO: 3671 - DNA, 146 bp, Artificial Sequence
  Bisulfite Padlock Probe
  misc_feature 94, 95, 96, 97, 98, 99: n = A,T,C or G
gactggaagagcactgttcaaacaaaactacaacccccgccttacgttggaggctcatcgttcctattcaggcagatgttatcgaggtccgacnnnnnntaaaaacctccaaccccgactcaaatcgatcggatacgcatgaggct

SEQ ID NO: 3672 - DNA, 146 bp, Artificial Sequence
  Bisulfite Padlock Probe
  misc_feature 92, 93, 94, 95, 96, 97: n = A,T,C or G
gactggaagagcactgttcaaacaaaccaacccaacccaacccgttggaggctcatcgttcctattcaggcagatgttatcgaggtccgacnnnnnntataactaattcgaaaccgcttaccatccgatcggatacgcatgaggct

SEQ ID NO: 3673 - DNA, 146 bp, Artificial Sequence
  Bisulfite Padlock Probe
  misc_feature 96, 97, 98, 99, 100, 101: n = A,T,C or G
gactggaagagcactgttcaaacaaataataaacgaatccaaaaaacgttggaggctcatcgttcctattcaggcagatgttatcgaggtccgacnnnnnncaaactcccacgaacaacccaacacgatcggatacgcatgaggct

SEQ ID NO: 3674 - DNA, 146 bp, Artificial Sequence
  Bisulfite Padlock Probe
  misc_feature 96, 97, 98, 99, 100, 101: n = A,T,C or G
gactggaagagcactgttcaaacaaataataaacgaatccgaaaaacgttggaggctcatcgttcctattcaggcagatgttatcgaggtccgacnnnnnncaaactcccacgaacgacccaacacgatcggatacgcatgaggct

SEQ ID NO: 3675 - DNA, 146 bp, Artificial Sequence
  Bisulfite Padlock Probe
  misc_feature 96, 97, 98, 99, 100, 101: n = A,T,C or G
gactggaagagcactgttcaaacaaataccatctccccatcatctcagttggaggctcatcgttcctattcaggcagatgttatcgaggtccgacnnnnnnaaaccgaaacttcccccaataaaaagatcggatacgcatgaggct

SEQ ID NO: 3676 - DNA, 146 bp, Artificial Sequence
  Bisulfite Padlock Probe
  misc_feature 96, 97, 98, 99, 100, 101: n = A,T,C or G
gactggaagagcactgttcaaacaaataccatctccccatcatctcagttggaggctcatcgttcctattcaggcagatgttatcgaggtccgacnnnnnnaaaccgaaacttcccccgataaaaagatcggatacgcatgaggct

SEQ ID NO: 3677 - DNA, 146 bp, Artificial Sequence
  Bisulfite Padlock Probe
  misc_feature 93, 94, 95, 96, 97, 98: n = A,T,C or G
gactggaagagcactgttcaaacaaatcccgaatcaaaaaacaagttggaggctcatcgttcctattcaggcagatgttatcgaggtccgacnnnnnnctcttcctctatacacgcaaaccactacgatcggatacgcatgaggct

SEQ ID NO: 3678 - DNA, 146 bp, Artificial Sequence
  Bisulfite Padlock Probe
  misc_feature 93, 94, 95, 96, 97, 98: n = A,T,C or G
gactggaagagcactgttcaaacaaatcccgaatcgaaaaacaagttggaggctcatcgttcctattcaggcagatgttatcgaggtccgacnnnnnnctcttcctctatacacgcaaaccgctacgatcggatacgcatgaggct

SEQ ID NO: 3679 - DNA, 146 bp, Artificial Sequence
  Bisulfite Padlock Probe
  misc_feature 93, 94, 95, 96, 97, 98: n = A,T,C or G
gactggaagagcactgttcaaacaacccctcactttcctaccccgttggaggctcatcgttcctattcaggcagatgttatcgaggtccgacnnnnnnaaatttctttcctccgaactacaaaaaagatcggatacgcatgaggct

SEQ ID NO: 3680 - DNA, 146 bp, Artificial Sequence
  Bisulfite Padlock Probe
  misc_feature 93, 94, 95, 96, 97, 98: n = A,T,C or G
gactggaagagcactgttcaaacaatataaaatattcataaatcgttggaggctcatcgttcctattcaggcagatgttatcgaggtccgacnnnnnntctctccccacttttcctctctcctctagatcggatacgcatgaggct

SEQ ID NO: 3681 - DNA, 146 bp, Artificial Sequence
  Bisulfite Padlock Probe
  misc_feature 92, 93, 94, 95, 96, 97: n = A,T,C or G
gactggaagagcactgttcaaacacaaaaataaaaccaaaaacgttggaggctcatcgttcctattcaggcagatgttatcgaggtccgacnnnnnntaaaataaaaacgacaaaacccccaaaaagatcggatacgcatgaggct

SEQ ID NO: 3682 - DNA, 146 bp, Artificial Sequence
  Bisulfite Padlock Probe
  misc_feature 94, 95, 96, 97, 98, 99: n = A,T,C or G
gactggaagagcactgttcaaacacccaaaaactaaactatccccgttggaggctcatcgttcctattcaggcagatgttatcgaggtccgacnnnnnnaaaaacccgaaaaaccaacctcaaaaagatcggatacgcatgaggct

SEQ ID NO: 3683 - DNA, 146 bp, Artificial Sequence
  Bisulfite Padlock Probe
  misc_feature 96, 97, 98, 99, 100, 101: n = A,T,C or G
gactggaagagcactgttcaaacaccctaactctcaaaaacccccaagttggaggctcatcgttcctattcaggcagatgttatcgaggtccgacnnnnnnaacccaaccacaaacactccctctcgatcggatacgcatgaggct

SEQ ID NO: 3684 - DNA, 146 bp, Artificial Sequence
  Bisulfite Padlock Probe
  misc_feature 95, 96, 97, 98, 99, 100: n = A,T,C or G
gactggaagagcactgttcaaacaccctctaaacctccaataccccgttggaggctcatcgttcctattcaggcagatgttatcgaggtccgacnnnnnncacacaaaccttaatcactaacctacgatcggatacgcatgaggct

SEQ ID NO: 3685 - DNA, 146 bp, Artificial Sequence
  Bisulfite Padlock Probe
  misc_feature 92, 93, 94, 95, 96, 97: n = A,T,C or G
gactggaagagcactgttcaaacacgaaaataaaaccaaaaacgttggaggctcatcgttcctattcaggcagatgttatcgaggtccgacnnnnnntaaaataaaaacgacgaaacccccaaaaagatcggatacgcatgaggct

SEQ ID NO: 3686 - DNA, 146 bp, Artificial Sequence
  Bisulfite Padlock Probe
  misc_feature 93, 94, 95, 96, 97, 98: n = A,T,C or G
gactggaagagcactgttcaaacactcgttcacatctaaaatacgttggaggctcatcgttcctattcaggcagatgttatcgaggtccgacnnnnnnccttttcctaccctaaacccaccctttcgatcggatacgcatgaggct

SEQ ID NO: 3687 - DNA, 146 bp, Artificial Sequence
  Bisulfite Padlock Probe
  misc_feature 93, 94, 95, 96, 97, 98: n = A,T,C or G
gactggaagagcactgttcaaacactcgttcacgtctaaaatacgttggaggctcatcgttcctattcaggcagatgttatcgaggtccgacnnnnnnccttttcctaccctaaacccaccctttcgatcggatacgcatgaggct

SEQ ID NO: 3688 - DNA, 146 bp, Artificial Sequence
  Bisulfite Padlock Probe
  misc_feature 96, 97, 98, 99, 100, 101: n = A,T,C or G
gactggaagagcactgttcaaacacttaacaaatcaaaattctcaatgttggaggctcatcgttcctattcaggcagatgttatcgaggtccgacnnnnnntcgcgctcgaacctatcacataaccgatcggatacgcatgaggct

SEQ ID NO: 3689 - DNA, 146 bp, Artificial Sequence
  Bisulfite Padlock Probe
  misc_feature 96, 97, 98, 99, 100, 101: n = A,T,C or G
gactggaagagcactgttcaaacacttaacaaatcaaaattctcaatgttggaggctcatcgttcctattcaggcagatgttatcgaggtccgacnnnnnntcgcgctcgaacctatcacgtaaccgatcggatacgcatgaggct

SEQ ID NO: 3690 - DNA, 146 bp, Artificial Sequence
  Bisulfite Padlock Probe
  misc_feature 93, 94, 95, 96, 97, 98: n = A,T,C or G
gactggaagagcactgttcaaacataaaacctcaaaaccaaaatgttggaggctcatcgttcctattcaggcagatgttatcgaggtccgacnnnnnnaaaacccaacgcgaaccttaacaaaaaagatcggatacgcatgaggct

SEQ ID NO: 3691 - DNA, 146 bp, Artificial Sequence
  Bisulfite Padlock Probe
  misc_feature 95, 96, 97, 98, 99, 100: n = A,T,C or G
gactggaagagcactgttcaaacattcctaaaccccctcttaccccgttggaggctcatcgttcctattcaggcagatgttatcgaggtccgacnnnnnnaaaaaccacccaaaactaaaaattccgatcggatacgcatgaggct

SEQ ID NO: 3692 - DNA, 146 bp, Artificial Sequence
  Bisulfite Padlock Probe
  misc_feature 95, 96, 97, 98, 99, 100: n = A,T,C or G
gactggaagagcactgttcaaaccaacccaaataacacaacccctcgttggaggctcatcgttcctattcaggcagatgttatcgaggtccgacnnnnnnaaaaacccgacgaaaacgaaaccaacgatcggatacgcatgaggct

SEQ ID NO: 3693 - DNA, 146 bp, Artificial Sequence
  Bisulfite Padlock Probe
  misc_feature 96, 97, 98, 99, 100, 101: n = A,T,C or G
gactggaagagcactgttcaaaccaacctaacctaataaaaactatagttggaggctcatcgttcctattcaggcagatgttatcgaggtccgacnnnnnntaaataatcccgcccgcccaaaaaagatcggatacgcatgaggct

SEQ ID NO: 3694 - DNA, 146 bp, Artificial Sequence
  Bisulfite Padlock Probe
  misc_feature 93, 94, 95, 96, 97, 98: n = A,T,C or G
gactggaagagcactgttcaaaccaacttaacccaccctactccgttggaggctcatcgttcctattcaggcagatgttatcgaggtccgacnnnnnnaaaaataaacgaaaaacgcgcaaaaatagatcggatacgcatgaggct

SEQ ID NO: 3695 - DNA, 146 bp, Artificial Sequence
  Bisulfite Padlock Probe
  misc_feature 93, 94, 95, 96, 97, 98: n = A,T,C or G
gactggaagagcactgttcaaaccaacttaacccgccctactccgttggaggctcatcgttcctattcaggcagatgttatcgaggtccgacnnnnnnaaaaataaacgaaaaacgcgcgaaaatagatcggatacgcatgaggct

SEQ ID NO: 3696 - DNA, 146 bp, Artificial Sequence
  Bisulfite Padlock Probe
  misc_feature 96, 97, 98, 99, 100, 101: n = A,T,C or G
gactggaagagcactgttcaaaccaccccctatctaacctctactccgttggaggctcatcgttcctattcaggcagatgttatcgaggtccgacnnnnnnccctaaacccgacccaaacctcctagatcggatacgcatgaggct

SEQ ID NO: 3697 - DNA, 146 bp, Artificial Sequence
  Bisulfite Padlock Probe
  misc_feature 95, 96, 97, 98, 99, 100: n = A,T,C or G
gactggaagagcactgttcaaaccataaactaaaactttctccaccgttggaggctcatcgttcctattcaggcagatgttatcgaggtccgacnnnnnncaacgctcccaactattaataaacacgatcggatacgcatgaggct

SEQ ID NO: 3698 - DNA, 146 bp, Artificial Sequence
  Bisulfite Padlock Probe
  misc_feature 95, 96, 97, 98, 99, 100: n = A,T,C or G
gactggaagagcactgttcaaaccataaactaaaactttctccaccgttggaggctcatcgttcctattcaggcagatgttatcgaggtccgacnnnnnncaacgctcccgactattaataaacacgatcggatacgcatgaggct

SEQ ID NO: 3699 - DNA, 146 bp, Artificial Sequence
  Bisulfite Padlock Probe
  misc_feature 95, 96, 97, 98, 99, 100: n = A,T,C or G
gactggaagagcactgttcaaacccaaaaactaccccttaccaactgttggaggctcatcgttcctattcaggcagatgttatcgaggtccgacnnnnnntaattacccccgaacccataatactcgatcggatacgcatgaggct

SEQ ID NO: 3700 - DNA, 146 bp, Artificial Sequence
  Bisulfite Padlock Probe
  misc_feature 92, 93, 94, 95, 96, 97: n = A,T,C or G
gactggaagagcactgttcaaacccaaacgaatcaaaaacaaagttggaggctcatcgttcctattcaggcagatgttatcgaggtccgacnnnnnnaaaatcaaataaaatcctaaatcctacaagatcggatacgcatgaggct

SEQ ID NO: 3701 - DNA, 146 bp, Artificial Sequence
  Bisulfite Padlock Probe
  misc_feature 92, 93, 94, 95, 96, 97: n = A,T,C or G
gactggaagagcactgttcaaacccaaacgaatcgaaaacaaagttggaggctcatcgttcctattcaggcagatgttatcgaggtccgacnnnnnnaaaatcaaataaaatcctaaatcctacaagatcggatacgcatgaggct

SEQ ID NO: 3702 - DNA, 146 bp, Artificial Sequence
  Bisulfite Padlock Probe
  misc_feature 95, 96, 97, 98, 99, 100: n = A,T,C or G
gactggaagagcactgttcaaacccgaaaactaccccttaccaactgttggaggctcatcgttcctattcaggcagatgttatcgaggtccgacnnnnnntaattacccccgaacccgtaatactcgatcggatacgcatgaggct

SEQ ID NO: 3703 - DNA, 146 bp, Artificial Sequence
  Bisulfite Padlock Probe
  misc_feature 94, 95, 96, 97, 98, 99: n = A,T,C or G
gactggaagagcactgttcaaacccgacgtactcgacacaaaaacgttggaggctcatcgttcctattcaggcagatgttatcgaggtccgacnnnnnnaaaacataaatccctaaatacccaaaagatcggatacgcatgaggct

SEQ ID NO: 3704 - DNA, 146 bp, Artificial Sequence
  Bisulfite Padlock Probe
  misc_feature 94, 95, 96, 97, 98, 99: n = A,T,C or G
gactggaagagcactgttcaaacccgacgtactcgacgcaaaaacgttggaggctcatcgttcctattcaggcagatgttatcgaggtccgacnnnnnnaaaacataaatccctaaatacccgaaagatcggatacgcatgaggct

SEQ ID NO: 3705 - DNA, 146 bp, Artificial Sequence
  Bisulfite Padlock Probe
  misc_feature 96, 97, 98, 99, 100, 101: n = A,T,C or G
gactggaagagcactgttcaaaccgaaaaattcctcgcgaaaaacacgttggaggctcatcgttcctattcaggcagatgttatcgaggtccgacnnnnnncaacgaaacaaccgaaaccaaaaaagatcggatacgcatgaggct

SEQ ID NO: 3706 - DNA, 146 bp, Artificial Sequence
  Bisulfite Padlock Probe
  misc_feature 96, 97, 98, 99, 100, 101: n = A,T,C or G
gactggaagagcactgttcaaaccgaaaaattcctcgcgaaaaacgcgttggaggctcatcgttcctattcaggcagatgttatcgaggtccgacnnnnnncaacgaaacaaccgaaaccgaaaaagatcggatacgcatgaggct

SEQ ID NO: 3707 - DNA, 146 bp, Artificial Sequence
  Bisulfite Padlock Probe
  misc_feature 96, 97, 98, 99, 100, 101: n = A,T,C or G
gactggaagagcactgttcaaaccgaaaatcgaccccaaaacttaaagttggaggctcatcgttcctattcaggcagatgttatcgaggtccgacnnnnnnataaacctctaaacgaccccaaaacgatcggatacgcatgaggct

SEQ ID NO: 3708 - DNA, 146 bp, Artificial Sequence
  Bisulfite Padlock Probe
  misc_feature 96, 97, 98, 99, 100, 101: n = A,T,C or G
gactggaagagcactgttcaaaccgaaaatcgaccccgaaacttaaagttggaggctcatcgttcctattcaggcagatgttatcgaggtccgacnnnnnnataaacctctaaacgaccccgaaacgatcggatacgcatgaggct

SEQ ID NO: 3709 - DNA, 146 bp, Artificial Sequence
  Bisulfite Padlock Probe
  misc_feature 92, 93, 94, 95, 96, 97: n = A,T,C or G
gactggaagagcactgttcaaaccgaaacacacaaccctaaaagttggaggctcatcgttcctattcaggcagatgttatcgaggtccgacnnnnnntctttcaactcctaaatatctcccccaaagatcggatacgcatgaggct

SEQ ID NO: 3710 - DNA, 146 bp, Artificial Sequence
  Bisulfite Padlock Probe
  misc_feature 92, 93, 94, 95, 96, 97: n = A,T,C or G
gactggaagagcactgttcaaaccgaaacgcacaaccctaaaagttggaggctcatcgttcctattcaggcagatgttatcgaggtccgacnnnnnntctttcaactcctaaatatctcccccgaagatcggatacgcatgaggct

SEQ ID NO: 3711 - DNA, 146 bp, Artificial Sequence
  Bisulfite Padlock Probe
  misc_feature 95, 96, 97, 98, 99, 100: n = A,T,C or G
gactggaagagcactgttcaaaccgacccaaataacacaacccctcgttggaggctcatcgttcctattcaggcagatgttatcgaggtccgacnnnnnnaaaaacccgacgaaaacgaaaccgacgatcggatacgcatgaggct

SEQ ID NO: 3712 - DNA, 146 bp, Artificial Sequence
  Bisulfite Padlock Probe
  misc_feature 96, 97, 98, 99, 100, 101: n = A,T,C or G
gactggaagagcactgttcaaaccgacctaacctaataaaaactatagttggaggctcatcgttcctattcaggcagatgttatcgaggtccgacnnnnnntaaataatcccgcccgcccgaaaaagatcggatacgcatgaggct

SEQ ID NO: 3713 - DNA, 146 bp, Artificial Sequence
  Bisulfite Padlock Probe
  misc_feature 96, 97, 98, 99, 100, 101: n = A,T,C or G
gactggaagagcactgttcaaaccgccccctatctaacctctactccgttggaggctcatcgttcctattcaggcagatgttatcgaggtccgacnnnnnnccctaaacccgacccgaacctcctagatcggatacgcatgaggct

SEQ ID NO: 3714 - DNA, 146 bp, Artificial Sequence
  Bisulfite Padlock Probe
  misc_feature 95, 96, 97, 98, 99, 100: n = A,T,C or G
gactggaagagcactgttcaaaccgtcaccccatttcacaaactaagttggaggctcatcgttcctattcaggcagatgttatcgaggtccgacnnnnnnaaccgtcgaattcgaattcccatctcgatcggatacgcatgaggct

SEQ ID NO: 3715 - DNA, 146 bp, Artificial Sequence
  Bisulfite Padlock Probe
  misc_feature 95, 96, 97, 98, 99, 100: n = A,T,C or G
gactggaagagcactgttcaaaccgtcgccccatttcacaaactaagttggaggctcatcgttcctattcaggcagatgttatcgaggtccgacnnnnnnaaccgtcgaattcgaattcccgtctcgatcggatacgcatgaggct

SEQ ID NO: 3716 - DNA, 146 bp, Artificial Sequence
  Bisulfite Padlock Probe
  misc_feature 95, 96, 97, 98, 99, 100: n = A,T,C or G
gactggaagagcactgttcaaacctaaaacaacgcgaaacaaaaaagttggaggctcatcgttcctattcaggcagatgttatcgaggtccgacnnnnnnctaccccgacgcgacaactacatctagatcggatacgcatgaggct

SEQ ID NO: 3717 - DNA, 146 bp, Artificial Sequence
  Bisulfite Padlock Probe
  misc_feature 95, 96, 97, 98, 99, 100: n = A,T,C or G
gactggaagagcactgttcaaacctaaaacaacgcgaaacgaaaaagttggaggctcatcgttcctattcaggcagatgttatcgaggtccgacnnnnnnctaccccgacgcgacgactacatctagatcggatacgcatgaggct

SEQ ID NO: 3718 - DNA, 146 bp, Artificial Sequence
  Bisulfite Padlock Probe
  misc_feature 92, 93, 94, 95, 96, 97: n = A,T,C or G
gactggaagagcactgttcaaacctaaccgcgtcactaaaactgttggaggctcatcgttcctattcaggcagatgttatcgaggtccgacnnnnnnccaaaaatacacacgtatccgcactatacgatcggatacgcatgaggct

SEQ ID NO: 3719 - DNA, 146 bp, Artificial Sequence
  Bisulfite Padlock Probe
  misc_feature 92, 93, 94, 95, 96, 97: n = A,T,C or G
gactggaagagcactgttcaaacctaaccgcgtcgctaaaactgttggaggctcatcgttcctattcaggcagatgttatcgaggtccgacnnnnnnccaaaaatacacacgtatccgcgctatacgatcggatacgcatgaggct

SEQ ID NO: 3720 - DNA, 146 bp, Artificial Sequence
  Bisulfite Padlock Probe
  misc_feature 93, 94, 95, 96, 97, 98: n = A,T,C or G
gactggaagagcactgttcaaacctaccatttactaactaaatagttggaggctcatcgttcctattcaggcagatgttatcgaggtccgacnnnnnntcttcttatacctacctctttcaaaaccgatcggatacgcatgaggct

SEQ ID NO: 3721 - DNA, 146 bp, Artificial Sequence
  Bisulfite Padlock Probe
  misc_feature 93, 94, 95, 96, 97, 98: n = A,T,C or G
gactggaagagcactgttcaaacctaccgtttactaactaaatagttggaggctcatcgttcctattcaggcagatgttatcgaggtccgacnnnnnntcttcttatacctacctctttcaaaaccgatcggatacgcatgaggct

SEQ ID NO: 3722 - DNA, 146 bp, Artificial Sequence
  Bisulfite Padlock Probe
  misc_feature 94, 95, 96, 97, 98, 99: n = A,T,C or G
gactggaagagcactgttcaaacctcgcgcaaatcctcctaaaacgttggaggctcatcgttcctattcaggcagatgttatcgaggtccgacnnnnnnccccaaacctccgtcctaatccaaaacgatcggatacgcatgaggct

SEQ ID NO: 3723 - DNA, 146 bp, Artificial Sequence
  Bisulfite Padlock Probe
  misc_feature 94, 95, 96, 97, 98, 99: n = A,T,C or G
gactggaagagcactgttcaaacctcgcgcgaatcctcctaaaacgttggaggctcatcgttcctattcaggcagatgttatcgaggtccgacnnnnnnccccaaacctccgtcctaatccgaaacgatcggatacgcatgaggct

SEQ ID NO: 3724 - DNA, 146 bp, Artificial Sequence
  Bisulfite Padlock Probe
  misc_feature 95, 96, 97, 98, 99, 100: n = A,T,C or G
gactggaagagcactgttcaaacgaaaactaaaactcttcctaaacgttggaggctcatcgttcctattcaggcagatgttatcgaggtccgacnnnnnnctcgtaaacaacctccaaaaaccgacgatcggatacgcatgaggct

SEQ ID NO: 3725 - DNA, 146 bp, Artificial Sequence
  Bisulfite Padlock Probe
  misc_feature 93, 94, 95, 96, 97, 98: n = A,T,C or G
gactggaagagcactgttcaaacgaaacacctaacgaacaaaacgttggaggctcatcgttcctattcaggcagatgttatcgaggtccgacnnnnnnaaaaatctcgaaaccccgaaacaaaaacgatcggatacgcatgaggct

SEQ ID NO: 3726 - DNA, 146 bp, Artificial Sequence
  Bisulfite Padlock Probe
  misc_feature 93, 94, 95, 96, 97, 98: n = A,T,C or G
gactggaagagcactgttcaaacgaaacacctaacgaacgaaacgttggaggctcatcgttcctattcaggcagatgttatcgaggtccgacnnnnnnaaaaatctcgaaaccccgaaacgaaaacgatcggatacgcatgaggct

SEQ ID NO: 3727 - DNA, 146 bp, Artificial Sequence
  Bisulfite Padlock Probe
  misc_feature 92, 93, 94, 95, 96, 97: n = A,T,C or G
gactggaagagcactgttcaaacgaaccaacccaacccaacccgttggaggctcatcgttcctattcaggcagatgttatcgaggtccgacnnnnnntataactaattcgaaaccgcttaccgtccgatcggatacgcatgaggct

SEQ ID NO: 3728 - DNA, 146 bp, Artificial Sequence
  Bisulfite Padlock Probe
  misc_feature 93, 94, 95, 96, 97, 98: n = A,T,C or G
gactggaagagcactgttcaaacgaaccgacacaaaaacaaaaagttggaggctcatcgttcctattcaggcagatgttatcgaggtccgacnnnnnnacgaaaaacgcgaacgacaaacaaaaacgatcggatacgcatgaggct

SEQ ID NO: 3729 - DNA, 146 bp, Artificial Sequence
  Bisulfite Padlock Probe
  misc_feature 93, 94, 95, 96, 97, 98: n = A,T,C or G
gactggaagagcactgttcaaacgaaccgacgcaaaaacaaaaagttggaggctcatcgttcctattcaggcagatgttatcgaggtccgacnnnnnnacgaaaaacgcgaacgacgaacaaaaacgatcggatacgcatgaggct

SEQ ID NO: 3730 - DNA, 146 bp, Artificial Sequence
  Bisulfite Padlock Probe
  misc_feature 94, 95, 96, 97, 98, 99: n = A,T,C or G
gactggaagagcactgttcaaacgacgaaaacgacgacgaacaacgttggaggctcatcgttcctattcaggcagatgttatcgaggtccgacnnnnnnctacgatctctacgccgcatcaattccgatcggatacgcatgaggct

SEQ ID NO: 3731 - DNA, 146 bp, Artificial Sequence
  Bisulfite Padlock Probe
  misc_feature 94, 95, 96, 97, 98, 99: n = A,T,C or G
gactggaagagcactgttcaaacgacgaaaacgacgacgaacgacgttggaggctcatcgttcctattcaggcagatgttatcgaggtccgacnnnnnnctacgatctctacgccgcatcgattccgatcggatacgcatgaggct

SEQ ID NO: 3732 - DNA, 146 bp, Artificial Sequence
  Bisulfite Padlock Probe
  misc_feature 93, 94, 95, 96, 97, 98: n = A,T,C or G
gactggaagagcactgttcaaacgcaaacaactcaccctaaaccgttggaggctcatcgttcctattcaggcagatgttatcgaggtccgacnnnnnnccaaatcacctcaactcaccacataaaagatcggatacgcatgaggct

SEQ ID NO: 3733 - DNA, 146 bp, Artificial Sequence
  Bisulfite Padlock Probe
  misc_feature 93, 94, 95, 96, 97, 98: n = A,T,C or G
gactggaagagcactgttcaaacgcaaacgactcaccctaaaccgttggaggctcatcgttcctattcaggcagatgttatcgaggtccgacnnnnnnccgaatcacctcaactcaccacataaaagatcggatacgcatgaggct

SEQ ID NO: 3734 - DNA, 146 bp, Artificial Sequence
  Bisulfite Padlock Probe
  misc_feature 95, 96, 97, 98, 99, 100: n = A,T,C or G
gactggaagagcactgttcaaacgccaacctctccaaaacttaactgttggaggctcatcgttcctattcaggcagatgttatcgaggtccgacnnnnnncccctcatctatacttaccttaaaaagatcggatacgcatgaggct

SEQ ID NO: 3735 - DNA, 146 bp, Artificial Sequence
  Bisulfite Padlock Probe
  misc_feature 94, 95, 96, 97, 98, 99: n = A,T,C or G
gactggaagagcactgttcaaacgcccaaaaactaaactatccccgttggaggctcatcgttcctattcaggcagatgttatcgaggtccgacnnnnnnaaaaacccgaaaaaccgacctcaaaaagatcggatacgcatgaggct

SEQ ID NO: 3736 - DNA, 146 bp, Artificial Sequence
  Bisulfite Padlock Probe
  misc_feature 95, 96, 97, 98, 99, 100: n = A,T,C or G
gactggaagagcactgttcaaacgccgacctctccaaaacttaactgttggaggctcatcgttcctattcaggcagatgttatcgaggtccgacnnnnnncccctcatctatacttaccttaaaaagatcggatacgcatgaggct

SEQ ID NO: 3737 - DNA, 146 bp, Artificial Sequence
  Bisulfite Padlock Probe
  misc_feature 95, 96, 97, 98, 99, 100: n = A,T,C or G
gactggaagagcactgttcaaacgcgttcgcacaattaatacaaacgttggaggctcatcgttcctattcaggcagatgttatcgaggtccgacnnnnnncaaaaactcaacgcctacacactcccgatcggatacgcatgaggct

SEQ ID NO: 3738 - DNA, 146 bp, Artificial Sequence
  Bisulfite Padlock Probe
  misc_feature 95, 96, 97, 98, 99, 100: n = A,T,C or G
gactggaagagcactgttcaaacgcgttcgcacgattaatacaaacgttggaggctcatcgttcctattcaggcagatgttatcgaggtccgacnnnnnncaaaaactcaacgcctacgcactcccgatcggatacgcatgaggct

SEQ ID NO: 3739 - DNA, 146 bp, Artificial Sequence
  Bisulfite Padlock Probe
  misc_feature 95, 96, 97, 98, 99, 100: n = A,T,C or G
gactggaagagcactgttcaaacgctcatcctcctactcatcttccgttggaggctcatcgttcctattcaggcagatgttatcgaggtccgacnnnnnnaccgtactctccttcaacaccataacgatcggatacgcatgaggct

SEQ ID NO: 3740 - DNA, 146 bp, Artificial Sequence
  Bisulfite Padlock Probe
  misc_feature 95, 96, 97, 98, 99, 100: n = A,T,C or G
gactggaagagcactgttcaaacgctcgtcctcctactcatcttccgttggaggctcatcgttcctattcaggcagatgttatcgaggtccgacnnnnnnaccgtactctccttcaacaccgtaacgatcggatacgcatgaggct

SEQ ID NO: 3741 - DNA, 146 bp, Artificial Sequence
  Bisulfite Padlock Probe
  misc_feature 93, 94, 95, 96, 97, 98: n = A,T,C or G
gactggaagagcactgttcaaacgtaaaacctcaaaaccaaaatgttggaggctcatcgttcctattcaggcagatgttatcgaggtccgacnnnnnnaaaacccaacgcgaaccttaacgaaaaagatcggatacgcatgaggct

SEQ ID NO: 3742 - DNA, 146 bp, Artificial Sequence
  Bisulfite Padlock Probe
  misc_feature 95, 96, 97, 98, 99, 100: n = A,T,C or G
gactggaagagcactgttcaaacgttcctaaaccccctcttaccccgttggaggctcatcgttcctattcaggcagatgttatcgaggtccgacnnnnnnaaaaaccgcccaaaactaaaaattccgatcggatacgcatgaggct

SEQ ID NO: 3743 - DNA, 146 bp, Artificial Sequence
  Bisulfite Padlock Probe
  misc_feature 92, 93, 94, 95, 96, 97: n = A,T,C or G
gactggaagagcactgttcaaactaaaactaaacaaaaaactcgttggaggctcatcgttcctattcaggcagatgttatcgaggtccgacnnnnnntctaaacgtccaaccttccaatacaccacgatcggatacgcatgaggct

SEQ ID NO: 3744 - DNA, 146 bp, Artificial Sequence
  Bisulfite Padlock Probe
  misc_feature 92, 93, 94, 95, 96, 97: n = A,T,C or G
gactggaagagcactgttcaaactaaaactaaacgaaaaactcgttggaggctcatcgttcctattcaggcagatgttatcgaggtccgacnnnnnntctaaacgtccaaccttccgatacaccacgatcggatacgcatgaggct

SEQ ID NO: 3745 - DNA, 146 bp, Artificial Sequence
  Bisulfite Padlock Probe
  misc_feature 94, 95, 96, 97, 98, 99: n = A,T,C or G
gactggaagagcactgttcaaactaaaatacaataacactatctcgttggaggctcatcgttcctattcaggcagatgttatcgaggtccgacnnnnnncctctaaaacccaaccccatccccatcgatcggatacgcatgaggct

SEQ ID NO: 3746 - DNA, 146 bp, Artificial Sequence
  Bisulfite Padlock Probe
  misc_feature 94, 95, 96, 97, 98, 99: n = A,T,C or G
gactggaagagcactgttcaaactaaaatacaataacgctatctcgttggaggctcatcgttcctattcaggcagatgttatcgaggtccgacnnnnnncctctaaaacccaaccccatccccatcgatcggatacgcatgaggct

SEQ ID NO: 3747 - DNA, 146 bp, Artificial Sequence
  Bisulfite Padlock Probe
  misc_feature 96, 97, 98, 99, 100, 101: n = A,T,C or G
gactggaagagcactgttcaaactaaacaacacaacaaacattataagttggaggctcatcgttcctattcaggcagatgttatcgaggtccgacnnnnnnctcctcctccgacgacaactaaaccgatcggatacgcatgaggct

SEQ ID NO: 3748 - DNA, 146 bp, Artificial Sequence
  Bisulfite Padlock Probe
  misc_feature 96, 97, 98, 99, 100, 101: n = A,T,C or G
gactggaagagcactgttcaaactaaacaacacaacgaacattataagttggaggctcatcgttcctattcaggcagatgttatcgaggtccgacnnnnnnctcctcctccgacgacgactaaaccgatcggatacgcatgaggct

SEQ ID NO: 3749 - DNA, 146 bp, Artificial Sequence
  Bisulfite Padlock Probe
  misc_feature 92, 93, 94, 95, 96, 97: n = A,T,C or G
gactggaagagcactgttcaaactaaactccatccatcctctcgttggaggctcatcgttcctattcaggcagatgttatcgaggtccgacnnnnnntacttatatcaaaatcaactatcaacacagatcggatacgcatgaggct

SEQ ID NO: 3750 - DNA, 146 bp, Artificial Sequence
  Bisulfite Padlock Probe
  misc_feature 94, 95, 96, 97, 98, 99: n = A,T,C or G
gactggaagagcactgttcaaactaaatcccctcccctttcccccgttggaggctcatcgttcctattcaggcagatgttatcgaggtccgacnnnnnncctcccgacccgaatacacttcaaaaagatcggatacgcatgaggct

SEQ ID NO: 3751 - DNA, 146 bp, Artificial Sequence
  Bisulfite Padlock Probe
  misc_feature 94, 95, 96, 97, 98, 99: n = A,T,C or G
gactggaagagcactgttcaaactaaatcccctcccctttcccccgttggaggctcatcgttcctattcaggcagatgttatcgaggtccgacnnnnnncctcccgacccgaatacgcttcaaaaagatcggatacgcatgaggct

SEQ ID NO: 3752 - DNA, 146 bp, Artificial Sequence
  Bisulfite Padlock Probe
  misc_feature 92, 93, 94, 95, 96, 97: n = A,T,C or G
gactggaagagcactgttcaaactacgaacaaaccccacaaaagttggaggctcatcgttcctattcaggcagatgttatcgaggtccgacnnnnnnaaaccgaaaaccgaaactcaacccaaaacgatcggatacgcatgaggct

SEQ ID NO: 3753 - DNA, 146 bp, Artificial Sequence
  Bisulfite Padlock Probe
  misc_feature 92, 93, 94, 95, 96, 97: n = A,T,C or G
gactggaagagcactgttcaaactacgaacaaaccccgcaaaagttggaggctcatcgttcctattcaggcagatgttatcgaggtccgacnnnnnnaaaccgaaaaccgaaactcgacccaaaacgatcggatacgcatgaggct

SEQ ID NO: 3754 - DNA, 146 bp, Artificial Sequence
  Bisulfite Padlock Probe
  misc_feature 92, 93, 94, 95, 96, 97: n = A,T,C or G
gactggaagagcactgttcaaactatacctccaccacacccatgttggaggctcatcgttcctattcaggcagatgttatcgaggtccgacnnnnnnttataaaacaaaataatctaatctaaaccgatcggatacgcatgaggct

SEQ ID NO: 3755 - DNA, 146 bp, Artificial Sequence
  Bisulfite Padlock Probe
  misc_feature 95, 96, 97, 98, 99, 100: n = A,T,C or G
gactggaagagcactgttcaaactcaaaattctatttcaaaaccctgttggaggctcatcgttcctattcaggcagatgttatcgaggtccgacnnnnnntcattttcacttcctaactttaaaaagatcggatacgcatgaggct

SEQ ID NO: 3756 - DNA, 146 bp, Artificial Sequence
  Bisulfite Padlock Probe
  misc_feature 92, 93, 94, 95, 96, 97: n = A,T,C or G
gactggaagagcactgttcaaactcacactaataaataaacacgttggaggctcatcgttcctattcaggcagatgttatcgaggtccgacnnnnnnaaaaacacgaaaatcaaaacaaaacaaacgatcggatacgcatgaggct

SEQ ID NO: 3757 - DNA, 146 bp, Artificial Sequence
  Bisulfite Padlock Probe
  misc_feature 92, 93, 94, 95, 96, 97: n = A,T,C or G
gactggaagagcactgttcaaactccaaaaacacccaaactccgttggaggctcatcgttcctattcaggcagatgttatcgaggtccgacnnnnnnaacgcaaaacacaacaaaacccctaaaccgatcggatacgcatgaggct

SEQ ID NO: 3758 - DNA, 146 bp, Artificial Sequence
  Bisulfite Padlock Probe
  misc_feature 92, 93, 94, 95, 96, 97: n = A,T,C or G
gactggaagagcactgttcaaactccaaaaacgcccaaactccgttggaggctcatcgttcctattcaggcagatgttatcgaggtccgacnnnnnnaacgcaaaacacgacaaaacccctaaaccgatcggatacgcatgaggct

SEQ ID NO: 3759 - DNA, 146 bp, Artificial Sequence
  Bisulfite Padlock Probe
  misc_feature 92, 93, 94, 95, 96, 97: n = A,T,C or G
gactggaagagcactgttcaaactccaaccccgccaaaaactcgttggaggctcatcgttcctattcaggcagatgttatcgaggtccgacnnnnnnctcgccaaacacaaaacaaaactaacaatgatcggatacgcatgaggct

SEQ ID NO: 3760 - DNA, 146 bp, Artificial Sequence
  Bisulfite Padlock Probe
  misc_feature 92, 93, 94, 95, 96, 97: n = A,T,C or G
gactggaagagcactgttcaaactccaaccccgccgaaaactcgttggaggctcatcgttcctattcaggcagatgttatcgaggtccgacnnnnnnctcgccaaacgcaaaacaaaactaacaatgatcggatacgcatgaggct

SEQ ID NO: 3761 - DNA, 146 bp, Artificial Sequence
  Bisulfite Padlock Probe
  misc_feature 92, 93, 94, 95, 96, 97: n = A,T,C or G
gactggaagagcactgttcaaactccaaccgcaaacaaaaaacgttggaggctcatcgttcctattcaggcagatgttatcgaggtccgacnnnnnnatacccacttctcaatccaaaccaaacctgatcggatacgcatgaggct

SEQ ID NO: 3762 - DNA, 146 bp, Artificial Sequence
  Bisulfite Padlock Probe
  misc_feature 92, 93, 94, 95, 96, 97: n = A,T,C or G
gactggaagagcactgttcaaactccaaccgcaaacgaaaaacgttggaggctcatcgttcctattcaggcagatgttatcgaggtccgacnnnnnnatacccgcttctcaatccaaaccaaacctgatcggatacgcatgaggct

SEQ ID NO: 3763 - DNA, 146 bp, Artificial Sequence
  Bisulfite Padlock Probe
  misc_feature 92, 93, 94, 95, 96, 97: n = A,T,C or G
gactggaagagcactgttcaaactccccgaaacactcaacctcgttggaggctcatcgttcctattcaggcagatgttatcgaggtccgacnnnnnntaaactactcccaacactaatccaaaaccgatcggatacgcatgaggct

SEQ ID NO: 3764 - DNA, 146 bp, Artificial Sequence
  Bisulfite Padlock Probe
  misc_feature 92, 93, 94, 95, 96, 97: n = A,T,C or G
gactggaagagcactgttcaaactccccgaaacgctcaacctcgttggaggctcatcgttcctattcaggcagatgttatcgaggtccgacnnnnnntaaactactcccaacgctaatccaaaaccgatcggatacgcatgaggct

SEQ ID NO: 3765 - DNA, 146 bp, Artificial Sequence
  Bisulfite Padlock Probe
  misc_feature 92, 93, 94, 95, 96, 97: n = A,T,C or G
gactggaagagcactgttcaaactcgacccgataaaaatcccagttggaggctcatcgttcctattcaggcagatgttatcgaggtccgacnnnnnncccaacccaaaaaacaacttaaaacataagatcggatacgcatgaggct

SEQ ID NO: 3766 - DNA, 146 bp, Artificial Sequence
  Bisulfite Padlock Probe
  misc_feature 92, 93, 94, 95, 96, 97: n = A,T,C or G
gactggaagagcactgttcaaactcgacccgataaaaatcccggttggaggctcatcgttcctattcaggcagatgttatcgaggtccgacnnnnnncccaacccgaaaaacaacttaaaacataagatcggatacgcatgaggct

SEQ ID NO: 3767 - DNA, 146 bp, Artificial Sequence
  Bisulfite Padlock Probe
  misc_feature 92, 93, 94, 95, 96, 97: n = A,T,C or G
gactggaagagcactgttcaaactcgcactaataaataaacacgttggaggctcatcgttcctattcaggcagatgttatcgaggtccgacnnnnnnaaaaacacgaaaatcgaaacaaaacaaacgatcggatacgcatgaggct

SEQ ID NO: 3768 - DNA, 146 bp, Artificial Sequence
  Bisulfite Padlock Probe
  misc_feature 95, 96, 97, 98, 99, 100: n = A,T,C or G
gactggaagagcactgttcaaactctaaaacaaacccttaaaacccgttggaggctcatcgttcctattcaggcagatgttatcgaggtccgacnnnnnnaccactaaccataactaacctaccccgatcggatacgcatgaggct

SEQ ID NO: 3769 - DNA, 146 bp, Artificial Sequence
  Bisulfite Padlock Probe
  misc_feature 95, 96, 97, 98, 99, 100: n = A,T,C or G
gactggaagagcactgttcaaactctaaaacaaacccttaaaacccgttggaggctcatcgttcctattcaggcagatgttatcgaggtccgacnnnnnnaccgctaaccataactaacctaccccgatcggatacgcatgaggct

SEQ ID NO: 3770 - DNA, 146 bp, Artificial Sequence
  Bisulfite Padlock Probe
  misc_feature 94, 95, 96, 97, 98, 99: n = A,T,C or G
gactggaagagcactgttcaaactctccaaactccaaaaacaaaagttggaggctcatcgttcctattcaggcagatgttatcgaggtccgacnnnnnnaaaaataacaaaacaaaacaataaaaagatcggatacgcatgaggct

SEQ ID NO: 3771 - DNA, 146 bp, Artificial Sequence
  Bisulfite Padlock Probe
  misc_feature 94, 95, 96, 97, 98, 99: n = A,T,C or G
gactggaagagcactgttcaaactctccaaactccaaaaacgaaagttggaggctcatcgttcctattcaggcagatgttatcgaggtccgacnnnnnnaaaaataacaaaacgaaacaataaaaagatcggatacgcatgaggct

SEQ ID NO: 3772 - DNA, 146 bp, Artificial Sequence
  Bisulfite Padlock Probe
  misc_feature 92, 93, 94, 95, 96, 97: n = A,T,C or G
gactggaagagcactgttcaaactttacaccaaaaattaaaccgttggaggctcatcgttcctattcaggcagatgttatcgaggtccgacnnnnnnaaaataacaataaatccaaaaaacctaatgatcggatacgcatgaggct

SEQ ID NO: 3773 - DNA, 146 bp, Artificial Sequence
  Bisulfite Padlock Probe
  misc_feature 92, 93, 94, 95, 96, 97: n = A,T,C or G
gactggaagagcactgttcaaactttacaccaaaaattaaaccgttggaggctcatcgttcctattcaggcagatgttatcgaggtccgacnnnnnnaaaataacaataaatccgaaaaacctaatgatcggatacgcatgaggct

SEQ ID NO: 3774 - DNA, 146 bp, Artificial Sequence
  Bisulfite Padlock Probe
  misc_feature 96, 97, 98, 99, 100, 101: n = A,T,C or G
gactggaagagcactgttcaaacttttataaaacgacaaacctaaaagttggaggctcatcgttcctattcaggcagatgttatcgaggtccgacnnnnnnataaaaacaacttttacaaaaacccgatcggatacgcatgaggct

SEQ ID NO: 3775 - DNA, 146 bp, Artificial Sequence
  Bisulfite Padlock Probe
  misc_feature 96, 97, 98, 99, 100, 101: n = A,T,C or G
gactggaagagcactgttcaaacttttataaaacgacgaacctaaaagttggaggctcatcgttcctattcaggcagatgttatcgaggtccgacnnnnnnataaaaacaacttttacaaaaacccgatcggatacgcatgaggct

SEQ ID NO: 3776 - DNA, 146 bp, Artificial Sequence
  Bisulfite Padlock Probe
  misc_feature 95, 96, 97, 98, 99, 100: n = A,T,C or G
gactggaagagcactgttcaaataaaaacttaaacaccccaaatttgttggaggctcatcgttcctattcaggcagatgttatcgaggtccgacnnnnnnataaaaacttaatttctccttttaatgatcggatacgcatgaggct

SEQ ID NO: 3777 - DNA, 146 bp, Artificial Sequence
  Bisulfite Padlock Probe
  misc_feature 96, 97, 98, 99, 100, 101: n = A,T,C or G
gactggaagagcactgttcaaataaaacaccaaataactaaacaaaagttggaggctcatcgttcctattcaggcagatgttatcgaggtccgacnnnnnnctattaaacgccgcgaacgccaaaagatcggatacgcatgaggct

SEQ ID NO: 3778 - DNA, 146 bp, Artificial Sequence
  Bisulfite Padlock Probe
  misc_feature 96, 97, 98, 99, 100, 101: n = A,T,C or G
gactggaagagcactgttcaaataaaacaccgaataactaaacaaaagttggaggctcatcgttcctattcaggcagatgttatcgaggtccgacnnnnnnctattaaacgccgcgaacgccgaaagatcggatacgcatgaggct

SEQ ID NO: 3779 - DNA, 146 bp, Artificial Sequence
  Bisulfite Padlock Probe
  misc_feature 94, 95, 96, 97, 98, 99: n = A,T,C or G
gactggaagagcactgttcaaataaactaccgaacacaaaactatgttggaggctcatcgttcctattcaggcagatgttatcgaggtccgacnnnnnnaaaaattcccttataaaataatacctagatcggatacgcatgaggct

SEQ ID NO: 3780 - DNA, 146 bp, Artificial Sequence
  Bisulfite Padlock Probe
  misc_feature 94, 95, 96, 97, 98, 99: n = A,T,C or G
gactggaagagcactgttcaaataaactaccgaacgcaaaactatgttggaggctcatcgttcctattcaggcagatgttatcgaggtccgacnnnnnnaaaaattcccttataaaataatacctagatcggatacgcatgaggct

SEQ ID NO: 3781 - DNA, 146 bp, Artificial Sequence
  Bisulfite Padlock Probe
  misc_feature 94, 95, 96, 97, 98, 99: n = A,T,C or G
gactggaagagcactgttcaaataactacactcaccacccaaatagttggaggctcatcgttcctattcaggcagatgttatcgaggtccgacnnnnnnatcgatactaaccaacaaccccaactcgatcggatacgcatgaggct

SEQ ID NO: 3782 - DNA, 146 bp, Artificial Sequence
  Bisulfite Padlock Probe
  misc_feature 94, 95, 96, 97, 98, 99: n = A,T,C or G
gactggaagagcactgttcaaataactacactcaccacccgaatagttggaggctcatcgttcctattcaggcagatgttatcgaggtccgacnnnnnnatcgatactaaccaacgaccccaactcgatcggatacgcatgaggct

SEQ ID NO: 3783 - DNA, 146 bp, Artificial Sequence
  Bisulfite Padlock Probe
  misc_feature 94, 95, 96, 97, 98, 99: n = A,T,C or G
gactggaagagcactgttcaaataattcttaaaacgacacccttcgttggaggctcatcgttcctattcaggcagatgttatcgaggtccgacnnnnnnaaaaataaaatccctcacccgcaacccgatcggatacgcatgaggct

SEQ ID NO: 3784 - DNA, 146 bp, Artificial Sequence
  Bisulfite Padlock Probe
  misc_feature 94, 95, 96, 97, 98, 99: n = A,T,C or G
gactggaagagcactgttcaaataattcttaaaacgacgcccttcgttggaggctcatcgttcctattcaggcagatgttatcgaggtccgacnnnnnnaaaaataaaatccctcacccgcgacccgatcggatacgcatgaggct

SEQ ID NO: 3785 - DNA, 146 bp, Artificial Sequence
  Bisulfite Padlock Probe
  misc_feature 92, 93, 94, 95, 96, 97: n = A,T,C or G
gactggaagagcactgttcaaatacaaaaacccaaacacaaaagttggaggctcatcgttcctattcaggcagatgttatcgaggtccgacnnnnnnctataaactatccaaacataacttaaaacgatcggatacgcatgaggct

SEQ ID NO: 3786 - DNA, 146 bp, Artificial Sequence
  Bisulfite Padlock Probe
  misc_feature 93, 94, 95, 96, 97, 98: n = A,T,C or G
gactggaagagcactgttcaaatacatcacctatcaacctaactgttggaggctcatcgttcctattcaggcagatgttatcgaggtccgacnnnnnnactctaaacctctcaaaaattaaaatccgatcggatacgcatgaggct

SEQ ID NO: 3787 - DNA, 146 bp, Artificial Sequence
  Bisulfite Padlock Probe
  misc_feature 93, 94, 95, 96, 97, 98: n = A,T,C or G
gactggaagagcactgttcaaatacatcgcctatcaacctaactgttggaggctcatcgttcctattcaggcagatgttatcgaggtccgacnnnnnnactctaaacctctcaaaaattaaaatccgatcggatacgcatgaggct

SEQ ID NO: 3788 - DNA, 146 bp, Artificial Sequence
  Bisulfite Padlock Probe
  misc_feature 94, 95, 96, 97, 98, 99: n = A,T,C or G
gactggaagagcactgttcaaataccaaacgactccaaacaaaaagttggaggctcatcgttcctattcaggcagatgttatcgaggtccgacnnnnnntatttattcaacaaacatttattaaacgatcggatacgcatgaggct

SEQ ID NO: 3789 - DNA, 146 bp, Artificial Sequence
  Bisulfite Padlock Probe
  misc_feature 94, 95, 96, 97, 98, 99: n = A,T,C or G
gactggaagagcactgttcaaataccaaacgactccgaacaaaaagttggaggctcatcgttcctattcaggcagatgttatcgaggtccgacnnnnnntatttattcaacaaacatttattaaacgatcggatacgcatgaggct

SEQ ID NO: 3790 - DNA, 146 bp, Artificial Sequence
  Bisulfite Padlock Probe
  misc_feature 96, 97, 98, 99, 100, 101: n = A,T,C or G
gactggaagagcactgttcaaataccaacaaaattaaatccaccaaagttggaggctcatcgttcctattcaggcagatgttatcgaggtccgacnnnnnnccaacccccgactaccaaaatcctagatcggatacgcatgaggct

SEQ ID NO: 3791 - DNA, 146 bp, Artificial Sequence
  Bisulfite Padlock Probe
  misc_feature 96, 97, 98, 99, 100, 101: n = A,T,C or G
gactggaagagcactgttcaaataccaacaaaattaaatccaccaaagttggaggctcatcgttcctattcaggcagatgttatcgaggtccgacnnnnnnccaacccccgactaccgaaatcctagatcggatacgcatgaggct

SEQ ID NO: 3792 - DNA, 146 bp, Artificial Sequence
  Bisulfite Padlock Probe
  misc_feature 94, 95, 96, 97, 98, 99: n = A,T,C or G
gactggaagagcactgttcaaatacgaaaacactaaaaacaaaaagttggaggctcatcgttcctattcaggcagatgttatcgaggtccgacnnnnnnctctaaatcccaactccatctaaacccgatcggatacgcatgaggct

SEQ ID NO: 3793 - DNA, 146 bp, Artificial Sequence
  Bisulfite Padlock Probe
  misc_feature 94, 95, 96, 97, 98, 99: n = A,T,C or G
gactggaagagcactgttcaaatacgaaaacactaaaaacgaaaagttggaggctcatcgttcctattcaggcagatgttatcgaggtccgacnnnnnnctctaaatcccgactccatctaaacccgatcggatacgcatgaggct

SEQ ID NO: 3794 - DNA, 146 bp, Artificial Sequence
  Bisulfite Padlock Probe
  misc_feature 92, 93, 94, 95, 96, 97: n = A,T,C or G
gactggaagagcactgttcaaatacgacccacaacctccaaacgttggaggctcatcgttcctattcaggcagatgttatcgaggtccgacnnnnnnccccaaatacctaacccaaataactccccgatcggatacgcatgaggct

SEQ ID NO: 3795 - DNA, 146 bp, Artificial Sequence
  Bisulfite Padlock Probe
  misc_feature 92, 93, 94, 95, 96, 97: n = A,T,C or G
gactggaagagcactgttcaaatacgacccgcaacctccaaacgttggaggctcatcgttcctattcaggcagatgttatcgaggtccgacnnnnnnccccgaatacctaacccaaataactccccgatcggatacgcatgaggct

SEQ ID NO: 3796 - DNA, 146 bp, Artificial Sequence
  Bisulfite Padlock Probe
  misc_feature 95, 96, 97, 98, 99, 100: n = A,T,C or G
gactggaagagcactgttcaaatactcataaaaccaaattctactcgttggaggctcatcgttcctattcaggcagatgttatcgaggtccgacnnnnnntacctaactatacacaaaccccaaacgatcggatacgcatgaggct

SEQ ID NO: 3797 - DNA, 146 bp, Artificial Sequence
  Bisulfite Padlock Probe
  misc_feature 95, 96, 97, 98, 99, 100: n = A,T,C or G
gactggaagagcactgttcaaatactcgtaaaaccaaattctactcgttggaggctcatcgttcctattcaggcagatgttatcgaggtccgacnnnnnntacctaactatacgcaaaccccaaacgatcggatacgcatgaggct

SEQ ID NO: 3798 - DNA, 146 bp, Artificial Sequence
  Bisulfite Padlock Probe
  misc_feature 92, 93, 94, 95, 96, 97: n = A,T,C or G
gactggaagagcactgttcaaatataaaaacccaaccaaaaacgttggaggctcatcgttcctattcaggcagatgttatcgaggtccgacnnnnnncccctcacaccaaaactcccaaaaataaagatcggatacgcatgaggct

SEQ ID NO: 3799 - DNA, 146 bp, Artificial Sequence
  Bisulfite Padlock Probe
  misc_feature 92, 93, 94, 95, 96, 97: n = A,T,C or G
gactggaagagcactgttcaaatataaaaacccgaccaaaaacgttggaggctcatcgttcctattcaggcagatgttatcgaggtccgacnnnnnncccctcgcaccaaaactcccaaaaataaagatcggatacgcatgaggct

SEQ ID NO: 3800 - DNA, 146 bp, Artificial Sequence
  Bisulfite Padlock Probe
  misc_feature 96, 97, 98, 99, 100, 101: n = A,T,C or G
gactggaagagcactgttcaaatataaaattaccatatttattaattgttggaggctcatcgttcctattcaggcagatgttatcgaggtccgacnnnnnnctccatttcccgcacaataaataaagatcggatacgcatgaggct

SEQ ID NO: 3801 - DNA, 146 bp, Artificial Sequence
  Bisulfite Padlock Probe
  misc_feature 92, 93, 94, 95, 96, 97: n = A,T,C or G
gactggaagagcactgttcaaatatacacaaacaaacatatacgttggaggctcatcgttcctattcaggcagatgttatcgaggtccgacnnnnnnaaaaatctcccatctcgaaacccataactgatcggatacgcatgaggct

SEQ ID NO: 3802 - DNA, 146 bp, Artificial Sequence
  Bisulfite Padlock Probe
  misc_feature 92, 93, 94, 95, 96, 97: n = A,T,C or G
gactggaagagcactgttcaaatatacacaaacaaacgtatacgttggaggctcatcgttcctattcaggcagatgttatcgaggtccgacnnnnnnaaaaatctcccatctcgaaacccgtaactgatcggatacgcatgaggct

SEQ ID NO: 3803 - DNA, 146 bp, Artificial Sequence
  Bisulfite Padlock Probe
  misc_feature 95, 96, 97, 98, 99, 100: n = A,T,C or G
gactggaagagcactgttcaaatcaaaatctaattccaaaaccaccgttggaggctcatcgttcctattcaggcagatgttatcgaggtccgacnnnnnnaaaaacataaacaaaaacataaccccgatcggatacgcatgaggct

SEQ ID NO: 3804 - DNA, 146 bp, Artificial Sequence
  Bisulfite Padlock Probe
  misc_feature 95, 96, 97, 98, 99, 100: n = A,T,C or G
gactggaagagcactgttcaaatcaaaatctaattccaaaaccaccgttggaggctcatcgttcctattcaggcagatgttatcgaggtccgacnnnnnnaaaaacgtaaacaaaaacataaccccgatcggatacgcatgaggct

SEQ ID NO: 3805 - DNA, 146 bp, Artificial Sequence
  Bisulfite Padlock Probe
  misc_feature 95, 96, 97, 98, 99, 100: n = A,T,C or G
gactggaagagcactgttcaaatccaacgaatcgcaaacactataagttggaggctcatcgttcctattcaggcagatgttatcgaggtccgacnnnnnnaaacgaacgatcccgaaaacaccaaagatcggatacgcatgaggct

SEQ ID NO: 3806 - DNA, 146 bp, Artificial Sequence
  Bisulfite Padlock Probe
  misc_feature 95, 96, 97, 98, 99, 100: n = A,T,C or G
gactggaagagcactgttcaaatccaacgaatcgcaaacgctataagttggaggctcatcgttcctattcaggcagatgttatcgaggtccgacnnnnnnaaacgaacgatcccgaaaacgccaaagatcggatacgcatgaggct

SEQ ID NO: 3807 - DNA, 146 bp, Artificial Sequence
  Bisulfite Padlock Probe
  misc_feature 94, 95, 96, 97, 98, 99: n = A,T,C or G
gactggaagagcactgttcaaatcccaaaaccaaactaaacaaaagttggaggctcatcgttcctattcaggcagatgttatcgaggtccgacnnnnnntctaactaacaaatcccaaaaaactccgatcggatacgcatgaggct

SEQ ID NO: 3808 - DNA, 146 bp, Artificial Sequence
  Bisulfite Padlock Probe
  misc_feature 94, 95, 96, 97, 98, 99: n = A,T,C or G
gactggaagagcactgttcaaatcccaaaaccaaactaaacgaaagttggaggctcatcgttcctattcaggcagatgttatcgaggtccgacnnnnnntctaactaacaaatcccgaaaaactccgatcggatacgcatgaggct

SEQ ID NO: 3809 - DNA, 146 bp, Artificial Sequence
  Bisulfite Padlock Probe
  misc_feature 93, 94, 95, 96, 97, 98: n = A,T,C or G
gactggaagagcactgttcaaatccccgaacgaaccctaacaacgttggaggctcatcgttcctattcaggcagatgttatcgaggtccgacnnnnnnaaacctaattaaattaattttctaaaacgatcggatacgcatgaggct

SEQ ID NO: 3810 - DNA, 146 bp, Artificial Sequence
  Bisulfite Padlock Probe
  misc_feature 93, 94, 95, 96, 97, 98: n = A,T,C or G
gactggaagagcactgttcaaatccccgaacgaaccctaacgacgttggaggctcatcgttcctattcaggcagatgttatcgaggtccgacnnnnnnaaacctaattaaattaattttctaaaacgatcggatacgcatgaggct

SEQ ID NO: 3811 - DNA, 146 bp, Artificial Sequence
  Bisulfite Padlock Probe
  misc_feature 96, 97, 98, 99, 100, 101: n = A,T,C or G
gactggaagagcactgttcaaatcccctaccaatacctctacccctcgttggaggctcatcgttcctattcaggcagatgttatcgaggtccgacnnnnnnaaattcacaacatccacacaacaacgatcggatacgcatgaggct

SEQ ID NO: 3812 - DNA, 146 bp, Artificial Sequence
  Bisulfite Padlock Probe
  misc_feature 96, 97, 98, 99, 100, 101: n = A,T,C or G
gactggaagagcactgttcaaatcccctaccgatacctctacccctcgttggaggctcatcgttcctattcaggcagatgttatcgaggtccgacnnnnnnaaattcacgacatccacacaacaacgatcggatacgcatgaggct

SEQ ID NO: 3813 - DNA, 146 bp, Artificial Sequence
  Bisulfite Padlock Probe
  misc_feature 94, 95, 96, 97, 98, 99: n = A,T,C or G
gactggaagagcactgttcaaatccgaaaacgacaattactaaaagttggaggctcatcgttcctattcaggcagatgttatcgaggtccgacnnnnnnaaaacaaccaaaacctaacatccaaaagatcggatacgcatgaggct

SEQ ID NO: 3814 - DNA, 146 bp, Artificial Sequence
  Bisulfite Padlock Probe
  misc_feature 94, 95, 96, 97, 98, 99: n = A,T,C or G
gactggaagagcactgttcaaatccgaaaacgacgattactaaaagttggaggctcatcgttcctattcaggcagatgttatcgaggtccgacnnnnnnaaaacaaccaaaacctaacatccgaaagatcggatacgcatgaggct

SEQ ID NO: 3815 - DNA, 146 bp, Artificial Sequence
  Bisulfite Padlock Probe
  misc_feature 92, 93, 94, 95, 96, 97: n = A,T,C or G
gactggaagagcactgttcaaatccgacccgtacccacaaaacgttggaggctcatcgttcctattcaggcagatgttatcgaggtccgacnnnnnnaaaaatcacaactacaatcattcactcccgatcggatacgcatgaggct

SEQ ID NO: 3816 - DNA, 146 bp, Artificial Sequence
  Bisulfite Padlock Probe
  misc_feature 92, 93, 94, 95, 96, 97: n = A,T,C or G
gactggaagagcactgttcaaatccgacccgtacccgcaaaacgttggaggctcatcgttcctattcaggcagatgttatcgaggtccgacnnnnnnaaaaatcgcaactacaatcattcactcccgatcggatacgcatgaggct

SEQ ID NO: 3817 - DNA, 146 bp, Artificial Sequence
  Bisulfite Padlock Probe
  misc_feature 96, 97, 98, 99, 100, 101: n = A,T,C or G
gactggaagagcactgttcaaatcctcgctaaaccccaaaactaaaagttggaggctcatcgttcctattcaggcagatgttatcgaggtccgacnnnnnnaaaaactacccaaactactacccccgatcggatacgcatgaggct

SEQ ID NO: 3818 - DNA, 146 bp, Artificial Sequence
  Bisulfite Padlock Probe
  misc_feature 96, 97, 98, 99, 100, 101: n = A,T,C or G
gactggaagagcactgttcaaatcctcgctaaaccccgaaactaaaagttggaggctcatcgttcctattcaggcagatgttatcgaggtccgacnnnnnnaaaaactacccgaactactacccccgatcggatacgcatgaggct

SEQ ID NO: 3819 - DNA, 146 bp, Artificial Sequence
  Bisulfite Padlock Probe
  misc_feature 92, 93, 94, 95, 96, 97: n = A,T,C or G
gactggaagagcactgttcaaatcgcaaacgttcacaactattgttggaggctcatcgttcctattcaggcagatgttatcgaggtccgacnnnnnntcttcctctttcctccttccttcctcctcgatcggatacgcatgaggct

SEQ ID NO: 3820 - DNA, 146 bp, Artificial Sequence
  Bisulfite Padlock Probe
  misc_feature 92, 93, 94, 95, 96, 97: n = A,T,C or G
gactggaagagcactgttcaaatcgcaaacgttcgcaactattgttggaggctcatcgttcctattcaggcagatgttatcgaggtccgacnnnnnntcttcctctttcctccttccttcctcctcgatcggatacgcatgaggct

SEQ ID NO: 3821 - DNA, 146 bp, Artificial Sequence
  Bisulfite Padlock Probe
  misc_feature 96, 97, 98, 99, 100, 101: n = A,T,C or G
gactggaagagcactgttcaaatcgtcaaaatctctaccatttaaccgttggaggctcatcgttcctattcaggcagatgttatcgaggtccgacnnnnnncaaaatcaactccaaaaataaaaacgatcggatacgcatgaggct

SEQ ID NO: 3822 - DNA, 146 bp, Artificial Sequence
  Bisulfite Padlock Probe
  misc_feature 96, 97, 98, 99, 100, 101: n = A,T,C or G
gactggaagagcactgttcaaatcgtcaaaatctctaccgtttaaccgttggaggctcatcgttcctattcaggcagatgttatcgaggtccgacnnnnnncaaaatcgactccaaaaataaaaacgatcggatacgcatgaggct

SEQ ID NO: 3823 - DNA, 146 bp, Artificial Sequence
  Bisulfite Padlock Probe
  misc_feature 92, 93, 94, 95, 96, 97: n = A,T,C or G
gactggaagagcactgttcaaattaactaaaactacaataaccgttggaggctcatcgttcctattcaggcagatgttatcgaggtccgacnnnnnnaaaaatcaatcaaataactaaaaaccaaagatcggatacgcatgaggct

SEQ ID NO: 3824 - DNA, 146 bp, Artificial Sequence
  Bisulfite Padlock Probe
  misc_feature 92, 93, 94, 95, 96, 97: n = A,T,C or G
gactggaagagcactgttcaaattaactaaaactacgataaccgttggaggctcatcgttcctattcaggcagatgttatcgaggtccgacnnnnnnaaaaatcaatcaaataactaaaaaccaaagatcggatacgcatgaggct

SEQ ID NO: 3825 - DNA, 146 bp, Artificial Sequence
  Bisulfite Padlock Probe
  misc_feature 94, 95, 96, 97, 98, 99: n = A,T,C or G
gactggaagagcactgttcaaattatccaaactctaattacccacgttggaggctcatcgttcctattcaggcagatgttatcgaggtccgacnnnnnnatataaaacacaataaacaaacccaaagatcggatacgcatgaggct

SEQ ID NO: 3826 - DNA, 146 bp, Artificial Sequence
  Bisulfite Padlock Probe
  misc_feature 94, 95, 96, 97, 98, 99: n = A,T,C or G
gactggaagagcactgttcaaattatccaaactctaattacccacgttggaggctcatcgttcctattcaggcagatgttatcgaggtccgacnnnnnnatataaaacacgataaacaaacccaaagatcggatacgcatgaggct

SEQ ID NO: 3827 - DNA, 146 bp, Artificial Sequence
  Bisulfite Padlock Probe
  misc_feature 94, 95, 96, 97, 98, 99: n = A,T,C or G
gactggaagagcactgttcaaattctaacccaactttcaacaactgttggaggctcatcgttcctattcaggcagatgttatcgaggtccgacnnnnnnaaaaacttccaacttaaaacaaaaatcgatcggatacgcatgaggct

SEQ ID NO: 3828 - DNA, 146 bp, Artificial Sequence
  Bisulfite Padlock Probe
  misc_feature 94, 95, 96, 97, 98, 99: n = A,T,C or G
gactggaagagcactgttcaaattctaacccgactttcaacaactgttggaggctcatcgttcctattcaggcagatgttatcgaggtccgacnnnnnnaaaaacttccaacttaaaacgaaaatcgatcggatacgcatgaggct

SEQ ID NO: 3829 - DNA, 146 bp, Artificial Sequence
  Bisulfite Padlock Probe
  misc_feature 95, 96, 97, 98, 99, 100: n = A,T,C or G
gactggaagagcactgttcaaattttataaaataacttaaacaaaagttggaggctcatcgttcctattcaggcagatgttatcgaggtccgacnnnnnnccaaaaacaaaccaaacctcaatctcgatcggatacgcatgaggct

SEQ ID NO: 3830 - DNA, 146 bp, Artificial Sequence
  Bisulfite Padlock Probe
  misc_feature 93, 94, 95, 96, 97, 98: n = A,T,C or G
gactggaagagcactgttcaacaaaaactacaccaaatacctacgttggaggctcatcgttcctattcaggcagatgttatcgaggtccgacnnnnnntccaaacaatttataaaaattaaaactagatcggatacgcatgaggct

SEQ ID NO: 3831 - DNA, 146 bp, Artificial Sequence
  Bisulfite Padlock Probe
  misc_feature 93, 94, 95, 96, 97, 98: n = A,T,C or G
gactggaagagcactgttcaacaaaaactacaccaaatacctacgttggaggctcatcgttcctattcaggcagatgttatcgaggtccgacnnnnnntccaaacgatttataaaaattaaaactagatcggatacgcatgaggct

SEQ ID NO: 3832 - DNA, 146 bp, Artificial Sequence
  Bisulfite Padlock Probe
  misc_feature 94, 95, 96, 97, 98, 99: n = A,T,C or G
gactggaagagcactgttcaacaaaacccgaaacccacccataacgttggaggctcatcgttcctattcaggcagatgttatcgaggtccgacnnnnnnaaaatcaacgcaatcaacacccctaaagatcggatacgcatgaggct

SEQ ID NO: 3833 - DNA, 146 bp, Artificial Sequence
  Bisulfite Padlock Probe
  misc_feature 94, 95, 96, 97, 98, 99: n = A,T,C or G
gactggaagagcactgttcaacaaaacccgaaacccgcccataacgttggaggctcatcgttcctattcaggcagatgttatcgaggtccgacnnnnnnaaaatcaacgcgatcaacacccctaaagatcggatacgcatgaggct

SEQ ID NO: 3834 - DNA, 146 bp, Artificial Sequence
  Bisulfite Padlock Probe
  misc_feature 95, 96, 97, 98, 99, 100: n = A,T,C or G
gactggaagagcactgttcaacaaacaaaacatactaaattactcagttggaggctcatcgttcctattcaggcagatgttatcgaggtccgacnnnnnnctttcaccacttttacccgcacctacgatcggatacgcatgaggct

SEQ ID NO: 3835 - DNA, 146 bp, Artificial Sequence
  Bisulfite Padlock Probe
  misc_feature 95, 96, 97, 98, 99, 100: n = A,T,C or G
gactggaagagcactgttcaacaaacaaaacatactaaattactcagttggaggctcatcgttcctattcaggcagatgttatcgaggtccgacnnnnnnctttcaccacttttacccgcgcctacgatcggatacgcatgaggct

SEQ ID NO: 3836 - DNA, 146 bp, Artificial Sequence
  Bisulfite Padlock Probe
  misc_feature 96, 97, 98, 99, 100, 101: n = A,T,C or G
gactggaagagcactgttcaacaaacaacgaccgaacccaaaaatacgttggaggctcatcgttcctattcaggcagatgttatcgaggtccgacnnnnnnctctcctaactctcaaacccctaacgatcggatacgcatgaggct

SEQ ID NO: 3837 - DNA, 146 bp, Artificial Sequence
  Bisulfite Padlock Probe
  misc_feature 96, 97, 98, 99, 100, 101: n = A,T,C or G
gactggaagagcactgttcaacaaacaacgaccgaacccgaaaatacgttggaggctcatcgttcctattcaggcagatgttatcgaggtccgacnnnnnnctctcctaactctcaaacccctaacgatcggatacgcatgaggct

SEQ ID NO: 3838 - DNA, 146 bp, Artificial Sequence
  Bisulfite Padlock Probe
  misc_feature 95, 96, 97, 98, 99, 100: n = A,T,C or G
gactggaagagcactgttcaacaaacacacctccacaataaaacccgttggaggctcatcgttcctattcaggcagatgttatcgaggtccgacnnnnnnacctccatcttactcaaattctccccgatcggatacgcatgaggct

SEQ ID NO: 3839 - DNA, 146 bp, Artificial Sequence
  Bisulfite Padlock Probe
  misc_feature 95, 96, 97, 98, 99, 100: n = A,T,C or G
gactggaagagcactgttcaacaaacacacctccacaataaaacccgttggaggctcatcgttcctattcaggcagatgttatcgaggtccgacnnnnnnacctccatcttactcgaattctccccgatcggatacgcatgaggct

SEQ ID NO: 3840 - DNA, 146 bp, Artificial Sequence
  Bisulfite Padlock Probe
  misc_feature 92, 93, 94, 95, 96, 97: n = A,T,C or G
gactggaagagcactgttcaacaaacgcctctcccaactaatagttggaggctcatcgttcctattcaggcagatgttatcgaggtccgacnnnnnnataaatacgcccgaaataccaaaactcccgatcggatacgcatgaggct

SEQ ID NO: 3841 - DNA, 146 bp, Artificial Sequence
  Bisulfite Padlock Probe
  misc_feature 92, 93, 94, 95, 96, 97: n = A,T,C or G
gactggaagagcactgttcaacaaacgcctctcccgactaatagttggaggctcatcgttcctattcaggcagatgttatcgaggtccgacnnnnnnataaatacgcccgaaataccgaaactcccgatcggatacgcatgaggct

SEQ ID NO: 3842 - DNA, 146 bp, Artificial Sequence
  Bisulfite Padlock Probe
  misc_feature 94, 95, 96, 97, 98, 99: n = A,T,C or G
gactggaagagcactgttcaacaacaaaatcacacacacacacaagttggaggctcatcgttcctattcaggcagatgttatcgaggtccgacnnnnnnaatctccctttctaccactacaaaaacgatcggatacgcatgaggct

SEQ ID NO: 3843 - DNA, 146 bp, Artificial Sequence
  Bisulfite Padlock Probe
  misc_feature 94, 95, 96, 97, 98, 99: n = A,T,C or G
gactggaagagcactgttcaacaacaaaatcacacacacacacaagttggaggctcatcgttcctattcaggcagatgttatcgaggtccgacnnnnnnaatctccctttctaccgctacaaaaacgatcggatacgcatgaggct

SEQ ID NO: 3844 - DNA, 146 bp, Artificial Sequence
  Bisulfite Padlock Probe
  misc_feature 93, 94, 95, 96, 97, 98: n = A,T,C or G
gactggaagagcactgttcaacaacaaatacctaaaaaccaaaagttggaggctcatcgttcctattcaggcagatgttatcgaggtccgacnnnnnnacaataacaactactaccactactctacgatcggatacgcatgaggct

SEQ ID NO: 3845 - DNA, 146 bp, Artificial Sequence
  Bisulfite Padlock Probe
  misc_feature 95, 96, 97, 98, 99, 100: n = A,T,C or G
gactggaagagcactgttcaacaacctaaaactccctatacaaaacgttggaggctcatcgttcctattcaggcagatgttatcgaggtccgacnnnnnnaaaaaccctaatccctcaactacaccgatcggatacgcatgaggct

SEQ ID NO: 3846 - DNA, 146 bp, Artificial Sequence
  Bisulfite Padlock Probe
  misc_feature 93, 94, 95, 96, 97, 98: n = A,T,C or G
gactggaagagcactgttcaacaacgaatacctaaaaaccaaaagttggaggctcatcgttcctattcaggcagatgttatcgaggtccgacnnnnnnacaataacgactactaccactactctacgatcggatacgcatgaggct

SEQ ID NO: 3847 - DNA, 146 bp, Artificial Sequence
  Bisulfite Padlock Probe
  misc_feature 95, 96, 97, 98, 99, 100: n = A,T,C or G
gactggaagagcactgttcaacaacgtctcaaaaaactaacaaaaagttggaggctcatcgttcctattcaggcagatgttatcgaggtccgacnnnnnncataacctcctcacccaactaataaagatcggatacgcatgaggct

SEQ ID NO: 3848 - DNA, 146 bp, Artificial Sequence
  Bisulfite Padlock Probe
  misc_feature 95, 96, 97, 98, 99, 100: n = A,T,C or G
gactggaagagcactgttcaacaacgtctcgaaaaactaacaaaaagttggaggctcatcgttcctattcaggcagatgttatcgaggtccgacnnnnnncataacctcctcgcccaactaataaagatcggatacgcatgaggct

SEQ ID NO: 3849 - DNA, 146 bp, Artificial Sequence
  Bisulfite Padlock Probe
  misc_feature 94, 95, 96, 97, 98, 99: n = A,T,C or G
gactggaagagcactgttcaacaactaaactcttctaaaaccatcgttggaggctcatcgttcctattcaggcagatgttatcgaggtccgacnnnnnntaattacctaaaaccgaattcatcacagatcggatacgcatgaggct

SEQ ID NO: 3850 - DNA, 146 bp, Artificial Sequence
  Bisulfite Padlock Probe
  misc_feature 94, 95, 96, 97, 98, 99: n = A,T,C or G
gactggaagagcactgttcaacaactaaactcttctaaaaccgtcgttggaggctcatcgttcctattcaggcagatgttatcgaggtccgacnnnnnntaattacctaaaaccgaattcatcgcagatcggatacgcatgaggct

SEQ ID NO: 3851 - DNA, 146 bp, Artificial Sequence
  Bisulfite Padlock Probe
  misc_feature 95, 96, 97, 98, 99, 100: n = A,T,C or G
gactggaagagcactgttcaacaactcccaactatcctcaaaatccgttggaggctcatcgttcctattcaggcagatgttatcgaggtccgacnnnnnncaaatacctatatccacactataatcgatcggatacgcatgaggct

SEQ ID NO: 3852 - DNA, 146 bp, Artificial Sequence
  Bisulfite Padlock Probe
  misc_feature 95, 96, 97, 98, 99, 100: n = A,T,C or G
gactggaagagcactgttcaacaactcccgactatcctcaaaatccgttggaggctcatcgttcctattcaggcagatgttatcgaggtccgacnnnnnncaaatacctatatccgcactataatcgatcggatacgcatgaggct

SEQ ID NO: 3853 - DNA, 146 bp, Artificial Sequence
  Bisulfite Padlock Probe
  misc_feature 92, 93, 94, 95, 96, 97: n = A,T,C or G
gactggaagagcactgttcaacaactctacgaaaaaccaaaacgttggaggctcatcgttcctattcaggcagatgttatcgaggtccgacnnnnnnaaataaaaacgaacaactactcttaaaacgatcggatacgcatgaggct

SEQ ID NO: 3854 - DNA, 146 bp, Artificial Sequence
  Bisulfite Padlock Probe
  misc_feature 92, 93, 94, 95, 96, 97: n = A,T,C or G
gactggaagagcactgttcaacaactctacgaaaaaccgaaacgttggaggctcatcgttcctattcaggcagatgttatcgaggtccgacnnnnnnaaataaaaacgaacgactactcttaaaacgatcggatacgcatgaggct

SEQ ID NO: 3855 - DNA, 146 bp, Artificial Sequence
  Bisulfite Padlock Probe
  misc_feature 93, 94, 95, 96, 97, 98: n = A,T,C or G
gactggaagagcactgttcaacaatatattaacacaaataaacagttggaggctcatcgttcctattcaggcagatgttatcgaggtccgacnnnnnnaaaacaaatcccaaatttctaactctacgatcggatacgcatgaggct

SEQ ID NO: 3856 - DNA, 146 bp, Artificial Sequence
  Bisulfite Padlock Probe
  misc_feature 93, 94, 95, 96, 97, 98: n = A,T,C or G
gactggaagagcactgttcaacaatatattaacgcaaataaacagttggaggctcatcgttcctattcaggcagatgttatcgaggtccgacnnnnnnaaaacgaatcccaaatttctaactctacgatcggatacgcatgaggct

SEQ ID NO: 3857 - DNA, 146 bp, Artificial Sequence
  Bisulfite Padlock Probe
  misc_feature 96, 97, 98, 99, 100, 101: n = A,T,C or G
gactggaagagcactgttcaacacaaactcctaaatacgacaataaagttggaggctcatcgttcctattcaggcagatgttatcgaggtccgacnnnnnncaccaacctaaacgatcaacccaacgatcggatacgcatgaggct

SEQ ID NO: 3858 - DNA, 146 bp, Artificial Sequence
  Bisulfite Padlock Probe
  misc_feature 96, 97, 98, 99, 100, 101: n = A,T,C or G
gactggaagagcactgttcaacacaaactcctaaatacgacgataaagttggaggctcatcgttcctattcaggcagatgttatcgaggtccgacnnnnnncaccaacctaaacgatcgacccaacgatcggatacgcatgaggct

SEQ ID NO: 3859 - DNA, 146 bp, Artificial Sequence
  Bisulfite Padlock Probe
  misc_feature 92, 93, 94, 95, 96, 97: n = A,T,C or G
gactggaagagcactgttcaacacaatccttactacctaaacagttggaggctcatcgttcctattcaggcagatgttatcgaggtccgacnnnnnncaaacctaaaaatacaattacattttaccgatcggatacgcatgaggct

SEQ ID NO: 3860 - DNA, 146 bp, Artificial Sequence
  Bisulfite Padlock Probe
  misc_feature 92, 93, 94, 95, 96, 97: n = A,T,C or G
gactggaagagcactgttcaacataaactctccccaactttaagttggaggctcatcgttcctattcaggcagatgttatcgaggtccgacnnnnnnccgaaaaacccgatactccgaaacaaaaagatcggatacgcatgaggct

SEQ ID NO: 3861 - DNA, 146 bp, Artificial Sequence
  Bisulfite Padlock Probe
  misc_feature 95, 96, 97, 98, 99, 100: n = A,T,C or G
gactggaagagcactgttcaacatctccaaacactctaaaactaccgttggaggctcatcgttcctattcaggcagatgttatcgaggtccgacnnnnnnttacgtactccacacaacacccaaccgatcggatacgcatgaggct

SEQ ID NO: 3862 - DNA, 146 bp, Artificial Sequence
  Bisulfite Padlock Probe
  misc_feature 95, 96, 97, 98, 99, 100: n = A,T,C or G
gactggaagagcactgttcaacatctccgaacactctaaaactaccgttggaggctcatcgttcctattcaggcagatgttatcgaggtccgacnnnnnnttacgtactccacacaacgcccaaccgatcggatacgcatgaggct

SEQ ID NO: 3863 - DNA, 146 bp, Artificial Sequence
  Bisulfite Padlock Probe
  misc_feature 93, 94, 95, 96, 97, 98: n = A,T,C or G
gactggaagagcactgttcaacatcttcccaaacccaaccctctgttggaggctcatcgttcctattcaggcagatgttatcgaggtccgacnnnnnnaacccatccactaaaattactccacaacgatcggatacgcatgaggct

SEQ ID NO: 3864 - DNA, 146 bp, Artificial Sequence
  Bisulfite Padlock Probe
  misc_feature 93, 94, 95, 96, 97, 98: n = A,T,C or G
gactggaagagcactgttcaacatcttcccaaacccgaccctctgttggaggctcatcgttcctattcaggcagatgttatcgaggtccgacnnnnnnaacccatccactaaaattactccgcaacgatcggatacgcatgaggct

SEQ ID NO: 3865 - DNA, 146 bp, Artificial Sequence
  Bisulfite Padlock Probe
  misc_feature 95, 96, 97, 98, 99, 100: n = A,T,C or G
gactggaagagcactgttcaaccaaaacccctactactacaaaaaagttggaggctcatcgttcctattcaggcagatgttatcgaggtccgacnnnnnntaactccctcctaactctaaacacttgatcggatacgcatgaggct

SEQ ID NO: 3866 - DNA, 146 bp, Artificial Sequence
  Bisulfite Padlock Probe
  misc_feature 95, 96, 97, 98, 99, 100: n = A,T,C or G
gactggaagagcactgttcaaccaaaacccctactactacgaaaaagttggaggctcatcgttcctattcaggcagatgttatcgaggtccgacnnnnnntaactccctcctaactctaaacgcttgatcggatacgcatgaggct

SEQ ID NO: 3867 - DNA, 146 bp, Artificial Sequence
  Bisulfite Padlock Probe
  misc_feature 92, 93, 94, 95, 96, 97: n = A,T,C or G
gactggaagagcactgttcaaccaaatctcttcgcgaaaccaagttggaggctcatcgttcctattcaggcagatgttatcgaggtccgacnnnnnnctatcccgacaccgtacaaactaaaaactgatcggatacgcatgaggct

SEQ ID NO: 3868 - DNA, 146 bp, Artificial Sequence
  Bisulfite Padlock Probe
  misc_feature 92, 93, 94, 95, 96, 97: n = A,T,C or G
gactggaagagcactgttcaaccaaatctcttcgcgaaaccgagttggaggctcatcgttcctattcaggcagatgttatcgaggtccgacnnnnnnctatcccgacaccgtacgaactaaaaactgatcggatacgcatgaggct

SEQ ID NO: 3869 - DNA, 146 bp, Artificial Sequence
  Bisulfite Padlock Probe
  misc_feature 96, 97, 98, 99, 100, 101: n = A,T,C or G
gactggaagagcactgttcaaccaaattaacaacttaaaaacttctcgttggaggctcatcgttcctattcaggcagatgttatcgaggtccgacnnnnnnaaactacaaatcaaatccaaaactcgatcggatacgcatgaggct

SEQ ID NO: 3870 - DNA, 146 bp, Artificial Sequence
  Bisulfite Padlock Probe
  misc_feature 96, 97, 98, 99, 100, 101: n = A,T,C or G
gactggaagagcactgttcaaccaaattaacaacttaaaaacttctcgttggaggctcatcgttcctattcaggcagatgttatcgaggtccgacnnnnnnaaactacgaatcaaatccaaaactcgatcggatacgcatgaggct

SEQ ID NO: 3871 - DNA, 146 bp, Artificial Sequence
  Bisulfite Padlock Probe
  misc_feature 96, 97, 98, 99, 100, 101: n = A,T,C or G
gactggaagagcactgttcaaccaacgactaacacataaataaacccgttggaggctcatcgttcctattcaggcagatgttatcgaggtccgacnnnnnnataacccaataaatatactaaaaccgatcggatacgcatgaggct

SEQ ID NO: 3872 - DNA, 146 bp, Artificial Sequence
  Bisulfite Padlock Probe
  misc_feature 96, 97, 98, 99, 100, 101: n = A,T,C or G
gactggaagagcactgttcaaccaacgactaacgcataaataaacccgttggaggctcatcgttcctattcaggcagatgttatcgaggtccgacnnnnnnataacccaataaatatactaaaaccgatcggatacgcatgaggct

SEQ ID NO: 3873 - DNA, 146 bp, Artificial Sequence
  Bisulfite Padlock Probe
  misc_feature 95, 96, 97, 98, 99, 100: n = A,T,C or G
gactggaagagcactgttcaaccaataaacgaacgaaccctaacaagttggaggctcatcgttcctattcaggcagatgttatcgaggtccgacnnnnnncaattcgacctacgacgcccaactacgatcggatacgcatgaggct

SEQ ID NO: 3874 - DNA, 146 bp, Artificial Sequence
  Bisulfite Padlock Probe
  misc_feature 95, 96, 97, 98, 99, 100: n = A,T,C or G
gactggaagagcactgttcaaccaataaacgaacgaaccctaacgagttggaggctcatcgttcctattcaggcagatgttatcgaggtccgacnnnnnncaattcgacctacgacgcccgactacgatcggatacgcatgaggct

SEQ ID NO: 3875 - DNA, 146 bp, Artificial Sequence
  Bisulfite Padlock Probe
  misc_feature 96, 97, 98, 99, 100, 101: n = A,T,C or G
gactggaagagcactgttcaaccaatccgaaacaataaatacaaaaagttggaggctcatcgttcctattcaggcagatgttatcgaggtccgacnnnnnnaaacgtccgcaaaactacaaaactagatcggatacgcatgaggct

SEQ ID NO: 3876 - DNA, 146 bp, Artificial Sequence
  Bisulfite Padlock Probe
  misc_feature 96, 97, 98, 99, 100, 101: n = A,T,C or G
gactggaagagcactgttcaaccaatccgaaacgataaatacaaaaagttggaggctcatcgttcctattcaggcagatgttatcgaggtccgacnnnnnnaaacgtccgcgaaactacaaaactagatcggatacgcatgaggct

SEQ ID NO: 3877 - DNA, 146 bp, Artificial Sequence
  Bisulfite Padlock Probe
  misc_feature 93, 94, 95, 96, 97, 98: n = A,T,C or G
gactggaagagcactgttcaaccaccaaaaccgcaacaaaaccagttggaggctcatcgttcctattcaggcagatgttatcgaggtccgacnnnnnnaataaacgaatcaaactaaaccataacagatcggatacgcatgaggct

SEQ ID NO: 3878 - DNA, 146 bp, Artificial Sequence
  Bisulfite Padlock Probe
  misc_feature 93, 94, 95, 96, 97, 98: n = A,T,C or G
gactggaagagcactgttcaaccaccaaaaccgcgacaaaaccagttggaggctcatcgttcctattcaggcagatgttatcgaggtccgacnnnnnnaataaacgaatcaaactaaaccgtaacagatcggatacgcatgaggct

SEQ ID NO: 3879 - DNA, 146 bp, Artificial Sequence
  Bisulfite Padlock Probe
  misc_feature 95, 96, 97, 98, 99, 100: n = A,T,C or G
gactggaagagcactgttcaaccaccgaccacaattctacaataaagttggaggctcatcgttcctattcaggcagatgttatcgaggtccgacnnnnnnaacctttatacgcccaaaatcaaatcgatcggatacgcatgaggct

SEQ ID NO: 3880 - DNA, 146 bp, Artificial Sequence
  Bisulfite Padlock Probe
  misc_feature 95, 96, 97, 98, 99, 100: n = A,T,C or G
gactggaagagcactgttcaaccaccgaccgcaattctacaataaagttggaggctcatcgttcctattcaggcagatgttatcgaggtccgacnnnnnnaacctttatacgcccgaaatcaaatcgatcggatacgcatgaggct

SEQ ID NO: 3881 - DNA, 146 bp, Artificial Sequence
  Bisulfite Padlock Probe
  misc_feature 92, 93, 94, 95, 96, 97: n = A,T,C or G
gactggaagagcactgttcaaccacttaccctaaaaccctaaagttggaggctcatcgttcctattcaggcagatgttatcgaggtccgacnnnnnnaatatcgaccgccaaacactctaaataacgatcggatacgcatgaggct

SEQ ID NO: 3882 - DNA, 146 bp, Artificial Sequence
  Bisulfite Padlock Probe
  misc_feature 95, 96, 97, 98, 99, 100: n = A,T,C or G
gactggaagagcactgttcaaccataaaaaccacactatcacctctgttggaggctcatcgttcctattcaggcagatgttatcgaggtccgacnnnnnnccccgaccacaaaactacacataaacgatcggatacgcatgaggct

SEQ ID NO: 3883 - DNA, 146 bp, Artificial Sequence
  Bisulfite Padlock Probe
  misc_feature 95, 96, 97, 98, 99, 100: n = A,T,C or G
gactggaagagcactgttcaaccataaaaaccacactatcacctctgttggaggctcatcgttcctattcaggcagatgttatcgaggtccgacnnnnnnccccgaccgcaaaactacacataaacgatcggatacgcatgaggct

SEQ ID NO: 3884 - DNA, 146 bp, Artificial Sequence
  Bisulfite Padlock Probe
  misc_feature 95, 96, 97, 98, 99, 100: n = A,T,C or G
gactggaagagcactgttcaacccaaaacgaacctcaaatcaaattgttggaggctcatcgttcctattcaggcagatgttatcgaggtccgacnnnnnnaacacccgacgtaaacctctacatccgatcggatacgcatgaggct

SEQ ID NO: 3885 - DNA, 146 bp, Artificial Sequence
  Bisulfite Padlock Probe
  misc_feature 95, 96, 97, 98, 99, 100: n = A,T,C or G
gactggaagagcactgttcaacccaaaacgaacctcgaatcaaattgttggaggctcatcgttcctattcaggcagatgttatcgaggtccgacnnnnnnaacacccgacgtaaacctctacgtccgatcggatacgcatgaggct

SEQ ID NO: 3886 - DNA, 146 bp, Artificial Sequence
  Bisulfite Padlock Probe
  misc_feature 93, 94, 95, 96, 97, 98: n = A,T,C or G
gactggaagagcactgttcaacccaaatccaattataaacaaaagttggaggctcatcgttcctattcaggcagatgttatcgaggtccgacnnnnnnaaaaatcaaatcataaccaccctaaaaagatcggatacgcatgaggct

SEQ ID NO: 3887 - DNA, 146 bp, Artificial Sequence
  Bisulfite Padlock Probe
  misc_feature 93, 94, 95, 96, 97, 98: n = A,T,C or G
gactggaagagcactgttcaacccaaatccgattataaacaaaagttggaggctcatcgttcctattcaggcagatgttatcgaggtccgacnnnnnnaaaaatcaaatcgtaaccaccctaaaaagatcggatacgcatgaggct

SEQ ID NO: 3888 - DNA, 146 bp, Artificial Sequence
  Bisulfite Padlock Probe
  misc_feature 96, 97, 98, 99, 100, 101: n = A,T,C or G
gactggaagagcactgttcaaccccataccaaaatctcaacacatttgttggaggctcatcgttcctattcaggcagatgttatcgaggtccgacnnnnnnaaaaaccaccctacacaccaccacagatcggatacgcatgaggct

SEQ ID NO: 3889 - DNA, 146 bp, Artificial Sequence
  Bisulfite Padlock Probe
  misc_feature 96, 97, 98, 99, 100, 101: n = A,T,C or G
gactggaagagcactgttcaaccccataccaaaatctcaacgcatttgttggaggctcatcgttcctattcaggcagatgttatcgaggtccgacnnnnnnaaaaaccaccctacacaccaccgcagatcggatacgcatgaggct

SEQ ID NO: 3890 - DNA, 146 bp, Artificial Sequence
  Bisulfite Padlock Probe
  misc_feature 95, 96, 97, 98, 99, 100: n = A,T,C or G
gactggaagagcactgttcaaccccgactaattcgtaaacataaacgttggaggctcatcgttcctattcaggcagatgttatcgaggtccgacnnnnnnctacaaaacgtacacgcaatattttcgatcggatacgcatgaggct

SEQ ID NO: 3891 - DNA, 146 bp, Artificial Sequence
  Bisulfite Padlock Probe
  misc_feature 95, 96, 97, 98, 99, 100: n = A,T,C or G
gactggaagagcactgttcaaccccgactaattcgtaaacgtaaacgttggaggctcatcgttcctattcaggcagatgttatcgaggtccgacnnnnnnctacaaaacgtacacgcgatattttcgatcggatacgcatgaggct

SEQ ID NO: 3892 - DNA, 146 bp, Artificial Sequence
  Bisulfite Padlock Probe
  misc_feature 96, 97, 98, 99, 100, 101: n = A,T,C or G
gactggaagagcactgttcaacccctccaactacaaaataaaaactagttggaggctcatcgttcctattcaggcagatgttatcgaggtccgacnnnnnncgaaactccaaaacaaaaatcccccgatcggatacgcatgaggct

SEQ ID NO: 3893 - DNA, 146 bp, Artificial Sequence
  Bisulfite Padlock Probe
  misc_feature 96, 97, 98, 99, 100, 101: n = A,T,C or G
gactggaagagcactgttcaacccctccgactacaaaataaaaactagttggaggctcatcgttcctattcaggcagatgttatcgaggtccgacnnnnnncgaaactccaaaacgaaaatcccccgatcggatacgcatgaggct

SEQ ID NO: 3894 - DNA, 146 bp, Artificial Sequence
  Bisulfite Padlock Probe
  misc_feature 92, 93, 94, 95, 96, 97: n = A,T,C or G
gactggaagagcactgttcaacccgaacaaacaaccccaaaccgttggaggctcatcgttcctattcaggcagatgttatcgaggtccgacnnnnnnaaaaccaaatttacttcacccacaactctgatcggatacgcatgaggct

SEQ ID NO: 3895 - DNA, 146 bp, Artificial Sequence
  Bisulfite Padlock Probe
  misc_feature 92, 93, 94, 95, 96, 97: n = A,T,C or G
gactggaagagcactgttcaacccgaacgaacaaccccaaaccgttggaggctcatcgttcctattcaggcagatgttatcgaggtccgacnnnnnnaaaaccaaatttacttcgcccacaactctgatcggatacgcatgaggct

SEQ ID NO: 3896 - DNA, 146 bp, Artificial Sequence
  Bisulfite Padlock Probe
  misc_feature 96, 97, 98, 99, 100, 101: n = A,T,C or G
gactggaagagcactgttcaacccgaacttccttccacgtacataaagttggaggctcatcgttcctattcaggcagatgttatcgaggtccgacnnnnnnaaaaacgaacccaacgcaccaacaagatcggatacgcatgaggct

SEQ ID NO: 3897 - DNA, 146 bp, Artificial Sequence
  Bisulfite Padlock Probe
  misc_feature 96, 97, 98, 99, 100, 101: n = A,T,C or G
gactggaagagcactgttcaacccgaacttccttccacgtacgtaaagttggaggctcatcgttcctattcaggcagatgttatcgaggtccgacnnnnnnaaaaacgaacccaacgcgccaacaagatcggatacgcatgaggct

SEQ ID NO: 3898 - DNA, 146 bp, Artificial Sequence
  Bisulfite Padlock Probe
  misc_feature 93, 94, 95, 96, 97, 98: n = A,T,C or G
gactggaagagcactgttcaaccctaacatccaaaacatcccccgttggaggctcatcgttcctattcaggcagatgttatcgaggtccgacnnnnnnaaaaacgaaatccaaatcctcccctccagatcggatacgcatgaggct

SEQ ID NO: 3899 - DNA, 146 bp, Artificial Sequence
  Bisulfite Padlock Probe
  misc_feature 93, 94, 95, 96, 97, 98: n = A,T,C or G
gactggaagagcactgttcaaccctaacatccgaaacatcccccgttggaggctcatcgttcctattcaggcagatgttatcgaggtccgacnnnnnnaaaaacgaaatccgaatcctcccctccagatcggatacgcatgaggct

SEQ ID NO: 3900 - DNA, 146 bp, Artificial Sequence
  Bisulfite Padlock Probe
  misc_feature 93, 94, 95, 96, 97, 98: n = A,T,C or G
gactggaagagcactgttcaaccctatcactcttaataaaacacgttggaggctcatcgttcctattcaggcagatgttatcgaggtccgacnnnnnnaaaataaataaacgctcccaccccatccgatcggatacgcatgaggct

SEQ ID NO: 3901 - DNA, 146 bp, Artificial Sequence
  Bisulfite Padlock Probe
  misc_feature 93, 94, 95, 96, 97, 98: n = A,T,C or G
gactggaagagcactgttcaaccctatcgctcttaataaaacacgttggaggctcatcgttcctattcaggcagatgttatcgaggtccgacnnnnnnaaaataaataaacgctcccgccccatccgatcggatacgcatgaggct

SEQ ID NO: 3902 - DNA, 146 bp, Artificial Sequence
  Bisulfite Padlock Probe
  misc_feature 96, 97, 98, 99, 100, 101: n = A,T,C or G
gactggaagagcactgttcaacccttaaaaatcttccactaaaacatgttggaggctcatcgttcctattcaggcagatgttatcgaggtccgacnnnnnncccgaaccgaaaccgaaaccaaaaagatcggatacgcatgaggct

SEQ ID NO: 3903 - DNA, 146 bp, Artificial Sequence
  Bisulfite Padlock Probe
  misc_feature 96, 97, 98, 99, 100, 101: n = A,T,C or G
gactggaagagcactgttcaacccttaaaaatcttccgctaaaacatgttggaggctcatcgttcctattcaggcagatgttatcgaggtccgacnnnnnncccgaaccgaaaccgaaaccgaaaagatcggatacgcatgaggct

SEQ ID NO: 3904 - DNA, 146 bp, Artificial Sequence
  Bisulfite Padlock Probe
  misc_feature 94, 95, 96, 97, 98, 99: n = A,T,C or G
gactggaagagcactgttcaaccgaaaaacaacgatcattacaacgttggaggctcatcgttcctattcaggcagatgttatcgaggtccgacnnnnnncccgcacctaaaatacctaaatcccccgatcggatacgcatgaggct

SEQ ID NO: 3905 - DNA, 146 bp, Artificial Sequence
  Bisulfite Padlock Probe
  misc_feature 94, 95, 96, 97, 98, 99: n = A,T,C or G
gactggaagagcactgttcaaccgaaaaacaacgatcgttacaacgttggaggctcatcgttcctattcaggcagatgttatcgaggtccgacnnnnnncccgcgcctaaaatacctaaatcccccgatcggatacgcatgaggct

SEQ ID NO: 3906 - DNA, 146 bp, Artificial Sequence
  Bisulfite Padlock Probe
  misc_feature 92, 93, 94, 95, 96, 97: n = A,T,C or G
gactggaagagcactgttcaaccgaacccgaaaccgaacaaacgttggaggctcatcgttcctattcaggcagatgttatcgaggtccgacnnnnnncctccgttccgttccgaatacaatccttagatcggatacgcatgaggct

SEQ ID NO: 3907 - DNA, 146 bp, Artificial Sequence
  Bisulfite Padlock Probe
  misc_feature 92, 93, 94, 95, 96, 97: n = A,T,C or G
gactggaagagcactgttcaaccgaacccgaaaccgaacgaacgttggaggctcatcgttcctattcaggcagatgttatcgaggtccgacnnnnnncctccgttccgttccgaatacgatccttagatcggatacgcatgaggct

SEQ ID NO: 3908 - DNA, 146 bp, Artificial Sequence
  Bisulfite Padlock Probe
  misc_feature 92, 93, 94, 95, 96, 97: n = A,T,C or G
gactggaagagcactgttcaaccgcccccgaaaacaacataacgttggaggctcatcgttcctattcaggcagatgttatcgaggtccgacnnnnnntctaaatctataattaattacttatctctgatcggatacgcatgaggct

SEQ ID NO: 3909 - DNA, 146 bp, Artificial Sequence
  Bisulfite Padlock Probe
  misc_feature 92, 93, 94, 95, 96, 97: n = A,T,C or G
gactggaagagcactgttcaaccgcccccgaaaacaacgtaacgttggaggctcatcgttcctattcaggcagatgttatcgaggtccgacnnnnnntctaaatctataattaattacttatctctgatcggatacgcatgaggct

SEQ ID NO: 3910 - DNA, 146 bp, Artificial Sequence
  Bisulfite Padlock Probe
  misc_feature 96, 97, 98, 99, 100, 101: n = A,T,C or G
gactggaagagcactgttcaaccgcgaaaacataacataaataataagttggaggctcatcgttcctattcaggcagatgttatcgaggtccgacnnnnnnaaacaataaacccaccgacgacaccgatcggatacgcatgaggct

SEQ ID NO: 3911 - DNA, 146 bp, Artificial Sequence
  Bisulfite Padlock Probe
  misc_feature 96, 97, 98, 99, 100, 101: n = A,T,C or G
gactggaagagcactgttcaaccgcgaaaacataacgtaaataataagttggaggctcatcgttcctattcaggcagatgttatcgaggtccgacnnnnnnaaacaataaacccaccgacgacgccgatcggatacgcatgaggct

SEQ ID NO: 3912 - DNA, 146 bp, Artificial Sequence
  Bisulfite Padlock Probe
  misc_feature 92, 93, 94, 95, 96, 97: n = A,T,C or G
gactggaagagcactgttcaaccgcttaccctaaaaccctaaagttggaggctcatcgttcctattcaggcagatgttatcgaggtccgacnnnnnnaatatcgaccgccaaacgctctaaataacgatcggatacgcatgaggct

SEQ ID NO: 3913 - DNA, 146 bp, Artificial Sequence
  Bisulfite Padlock Probe
  misc_feature 93, 94, 95, 96, 97, 98: n = A,T,C or G
gactggaagagcactgttcaacctaaacaaacgcgaaccaccaagttggaggctcatcgttcctattcaggcagatgttatcgaggtccgacnnnnnntcacctctactaaaaacgacaacaaaacgatcggatacgcatgaggct

SEQ ID NO: 3914 - DNA, 146 bp, Artificial Sequence
  Bisulfite Padlock Probe
  misc_feature 93, 94, 95, 96, 97, 98: n = A,T,C or G
gactggaagagcactgttcaacctaaacaaacgcgaaccgccaagttggaggctcatcgttcctattcaggcagatgttatcgaggtccgacnnnnnntcacctctactaaaaacgacgacaaaacgatcggatacgcatgaggct

SEQ ID NO: 3915 - DNA, 146 bp, Artificial Sequence
  Bisulfite Padlock Probe
  misc_feature 94, 95, 96, 97, 98, 99: n = A,T,C or G
gactggaagagcactgttcaacctaaactacccctatacaacaacgttggaggctcatcgttcctattcaggcagatgttatcgaggtccgacnnnnnnaaaaataacgccgaacgcgtcaacaacgatcggatacgcatgaggct

SEQ ID NO: 3916 - DNA, 146 bp, Artificial Sequence
  Bisulfite Padlock Probe
  misc_feature 94, 95, 96, 97, 98, 99: n = A,T,C or G
gactggaagagcactgttcaacctaaactacccctatacgacaacgttggaggctcatcgttcctattcaggcagatgttatcgaggtccgacnnnnnnaaaaataacgccgaacgcgtcgacaacgatcggatacgcatgaggct

SEQ ID NO: 3917 - DNA, 146 bp, Artificial Sequence
  Bisulfite Padlock Probe
  misc_feature 92, 93, 94, 95, 96, 97: n = A,T,C or G
gactggaagagcactgttcaacctaaccgactaattacacaaagttggaggctcatcgttcctattcaggcagatgttatcgaggtccgacnnnnnnaaaaacgaaacccccaacaatttcataaagatcggatacgcatgaggct

SEQ ID NO: 3918 - DNA, 146 bp, Artificial Sequence
  Bisulfite Padlock Probe
  misc_feature 92, 93, 94, 95, 96, 97: n = A,T,C or G
gactggaagagcactgttcaacctaaccgactaattacacgaagttggaggctcatcgttcctattcaggcagatgttatcgaggtccgacnnnnnnaaaaacgaaacccccgacaatttcataaagatcggatacgcatgaggct

SEQ ID NO: 3919 - DNA, 146 bp, Artificial Sequence
  Bisulfite Padlock Probe
  misc_feature 94, 95, 96, 97, 98, 99: n = A,T,C or G
gactggaagagcactgttcaacctaataaacaaaataccaactatgttggaggctcatcgttcctattcaggcagatgttatcgaggtccgacnnnnnnaaaaccgaatctaaactctacactaccgatcggatacgcatgaggct

SEQ ID NO: 3920 - DNA, 146 bp, Artificial Sequence
  Bisulfite Padlock Probe
  misc_feature 94, 95, 96, 97, 98, 99: n = A,T,C or G
gactggaagagcactgttcaacctaataaacaaaataccaactatgttggaggctcatcgttcctattcaggcagatgttatcgaggtccgacnnnnnnaaaaccgaatctaaactctacgctaccgatcggatacgcatgaggct

SEQ ID NO: 3921 - DNA, 146 bp, Artificial Sequence
  Bisulfite Padlock Probe
  misc_feature 92, 93, 94, 95, 96, 97: n = A,T,C or G
gactggaagagcactgttcaacctacgctactacatctcctccgttggaggctcatcgttcctattcaggcagatgttatcgaggtccgacnnnnnnaaacaaacgacaaaactaacaaacaacaagatcggatacgcatgaggct

SEQ ID NO: 3922 - DNA, 146 bp, Artificial Sequence
  Bisulfite Padlock Probe
  misc_feature 92, 93, 94, 95, 96, 97: n = A,T,C or G
gactggaagagcactgttcaacctacgctactacgtctcctccgttggaggctcatcgttcctattcaggcagatgttatcgaggtccgacnnnnnnaaacaaacgacaaaactaacgaacaacaagatcggatacgcatgaggct

SEQ ID NO: 3923 - DNA, 146 bp, Artificial Sequence
  Bisulfite Padlock Probe
  misc_feature 93, 94, 95, 96, 97, 98: n = A,T,C or G
gactggaagagcactgttcaacctccaataaatccccaaaacccgttggaggctcatcgttcctattcaggcagatgttatcgaggtccgacnnnnnnttctccaactcgaaacgcataaaaactagatcggatacgcatgaggct

SEQ ID NO: 3924 - DNA, 146 bp, Artificial Sequence
  Bisulfite Padlock Probe
  misc_feature 92, 93, 94, 95, 96, 97: n = A,T,C or G
gactggaagagcactgttcaacctccatctaaaaatactaaacgttggaggctcatcgttcctattcaggcagatgttatcgaggtccgacnnnnnnaaaattactatacttatcaatcaaatttcgatcggatacgcatgaggct

SEQ ID NO: 3925 - DNA, 146 bp, Artificial Sequence
  Bisulfite Padlock Probe
  misc_feature 95, 96, 97, 98, 99, 100: n = A,T,C or G
gactggaagagcactgttcaacctcgaaataaacgcaaaacaatacgttggaggctcatcgttcctattcaggcagatgttatcgaggtccgacnnnnnnccgaaattacgctaaacgacaaaaaagatcggatacgcatgaggct

SEQ ID NO: 3926 - DNA, 146 bp, Artificial Sequence
  Bisulfite Padlock Probe
  misc_feature 95, 96, 97, 98, 99, 100: n = A,T,C or G
gactggaagagcactgttcaacctcgaaataaacgcgaaacaatacgttggaggctcatcgttcctattcaggcagatgttatcgaggtccgacnnnnnnccgaaattacgctaaacgacgaaaaagatcggatacgcatgaggct

SEQ ID NO: 3927 - DNA, 146 bp, Artificial Sequence
  Bisulfite Padlock Probe
  misc_feature 96, 97, 98, 99, 100, 101: n = A,T,C or G
gactggaagagcactgttcaacgaaaccgaacgacgacaaacaaaacgttggaggctcatcgttcctattcaggcagatgttatcgaggtccgacnnnnnnctacaattcccgacgcacctaaaccgatcggatacgcatgaggct

SEQ ID NO: 3928 - DNA, 146 bp, Artificial Sequence
  Bisulfite Padlock Probe
  misc_feature 96, 97, 98, 99, 100, 101: n = A,T,C or G
gactggaagagcactgttcaacgaaaccgaacgacgacgaacaaaacgttggaggctcatcgttcctattcaggcagatgttatcgaggtccgacnnnnnnctacaattcccgacgcgcctaaaccgatcggatacgcatgaggct

SEQ ID NO: 3929 - DNA, 146 bp, Artificial Sequence
  Bisulfite Padlock Probe
  misc_feature 92, 93, 94, 95, 96, 97: n = A,T,C or G
gactggaagagcactgttcaacgaacaccgcgaaacacaaatagttggaggctcatcgttcctattcaggcagatgttatcgaggtccgacnnnnnnacccacctaatccctaaaaacaacaccctgatcggatacgcatgaggct

SEQ ID NO: 3930 - DNA, 146 bp, Artificial Sequence
  Bisulfite Padlock Probe
  misc_feature 92, 93, 94, 95, 96, 97: n = A,T,C or G
gactggaagagcactgttcaacgaacaccgcgaaacgcaaatagttggaggctcatcgttcctattcaggcagatgttatcgaggtccgacnnnnnnacccacctaatccctaaaaacaacaccctgatcggatacgcatgaggct

SEQ ID NO: 3931 - DNA, 146 bp, Artificial Sequence
  Bisulfite Padlock Probe
  misc_feature 95, 96, 97, 98, 99, 100: n = A,T,C or G
gactggaagagcactgttcaacgacaaacacacctaccccaacatagttggaggctcatcgttcctattcaggcagatgttatcgaggtccgacnnnnnnctacccacctacgcactaaaaaccacgatcggatacgcatgaggct

SEQ ID NO: 3932 - DNA, 146 bp, Artificial Sequence
  Bisulfite Padlock Probe
  misc_feature 95, 96, 97, 98, 99, 100: n = A,T,C or G
gactggaagagcactgttcaacgacaaacgcacctaccccaacatagttggaggctcatcgttcctattcaggcagatgttatcgaggtccgacnnnnnnctacccacctacgcgctaaaaaccacgatcggatacgcatgaggct

SEQ ID NO: 3933 - DNA, 146 bp, Artificial Sequence
  Bisulfite Padlock Probe
  misc_feature 96, 97, 98, 99, 100, 101: n = A,T,C or G
gactggaagagcactgttcaacgacgaacctaaacgaccactataacgttggaggctcatcgttcctattcaggcagatgttatcgaggtccgacnnnnnnaaaaatacgcacgccctctaacaacgatcggatacgcatgaggct

SEQ ID NO: 3934 - DNA, 146 bp, Artificial Sequence
  Bisulfite Padlock Probe
  misc_feature 96, 97, 98, 99, 100, 101: n = A,T,C or G
gactggaagagcactgttcaacgacgaacctaaacgaccgctataacgttggaggctcatcgttcctattcaggcagatgttatcgaggtccgacnnnnnnaaaaatacgcacgccctctaacgacgatcggatacgcatgaggct

SEQ ID NO: 3935 - DNA, 146 bp, Artificial Sequence
  Bisulfite Padlock Probe
  misc_feature 95, 96, 97, 98, 99, 100: n = A,T,C or G
gactggaagagcactgttcaacgcaataaaaaccataataaaaacagttggaggctcatcgttcctattcaggcagatgttatcgaggtccgacnnnnnnaatctactacaaacaattcaaataccgatcggatacgcatgaggct

SEQ ID NO: 3936 - DNA, 146 bp, Artificial Sequence
  Bisulfite Padlock Probe
  misc_feature 96, 97, 98, 99, 100, 101: n = A,T,C or G
gactggaagagcactgttcaacgcctccaaatacacctaatattcccgttggaggctcatcgttcctattcaggcagatgttatcgaggtccgacnnnnnnctccaacttacgcccaataacctaagatcggatacgcatgaggct

SEQ ID NO: 3937 - DNA, 146 bp, Artificial Sequence
  Bisulfite Padlock Probe
  misc_feature 96, 97, 98, 99, 100, 101: n = A,T,C or G
gactggaagagcactgttcaacgcctccaaatacgcctaatattcccgttggaggctcatcgttcctattcaggcagatgttatcgaggtccgacnnnnnnctccaacttacgcccgataacctaagatcggatacgcatgaggct

SEQ ID NO: 3938 - DNA, 146 bp, Artificial Sequence
  Bisulfite Padlock Probe
  misc_feature 94, 95, 96, 97, 98, 99: n = A,T,C or G
gactggaagagcactgttcaacgcgaatcataaaactaaactccagttggaggctcatcgttcctattcaggcagatgttatcgaggtccgacnnnnnnatcgacaattacccctatacccaaaacgatcggatacgcatgaggct

SEQ ID NO: 3939 - DNA, 146 bp, Artificial Sequence
  Bisulfite Padlock Probe
  misc_feature 94, 95, 96, 97, 98, 99: n = A,T,C or G
gactggaagagcactgttcaacgcgaatcgtaaaactaaactccagttggaggctcatcgttcctattcaggcagatgttatcgaggtccgacnnnnnnatcgacaattacccctatacccgaaacgatcggatacgcatgaggct

SEQ ID NO: 3940 - DNA, 146 bp, Artificial Sequence
  Bisulfite Padlock Probe
  misc_feature 95, 96, 97, 98, 99, 100: n = A,T,C or G
gactggaagagcactgttcaacgcgataaaaaccataataaaaacagttggaggctcatcgttcctattcaggcagatgttatcgaggtccgacnnnnnnaatctactacaaacgattcaaataccgatcggatacgcatgaggct

SEQ ID NO: 3941 - DNA, 146 bp, Artificial Sequence
  Bisulfite Padlock Probe
  misc_feature 93, 94, 95, 96, 97, 98: n = A,T,C or G
gactggaagagcactgttcaacgtcaaccccaaaactctaaaacgttggaggctcatcgttcctattcaggcagatgttatcgaggtccgacnnnnnncaaaacgcaaactttaccctaacaactagatcggatacgcatgaggct

SEQ ID NO: 3942 - DNA, 146 bp, Artificial Sequence
  Bisulfite Padlock Probe
  misc_feature 93, 94, 95, 96, 97, 98: n = A,T,C or G
gactggaagagcactgttcaacgtcaaccccgaaactctaaaacgttggaggctcatcgttcctattcaggcagatgttatcgaggtccgacnnnnnncaaaacgcaaactttaccctaacgactagatcggatacgcatgaggct

SEQ ID NO: 3943 - DNA, 146 bp, Artificial Sequence
  Bisulfite Padlock Probe
  misc_feature 92, 93, 94, 95, 96, 97: n = A,T,C or G
gactggaagagcactgttcaacgtcccaacaacctcaaataacgttggaggctcatcgttcctattcaggcagatgttatcgaggtccgacnnnnnnaaacctacctatcaacaaataaccaacccgatcggatacgcatgaggct

SEQ ID NO: 3944 - DNA, 146 bp, Artificial Sequence
  Bisulfite Padlock Probe
  misc_feature 95, 96, 97, 98, 99, 100: n = A,T,C or G
gactggaagagcactgttcaacgtcccacccttccctacaataaaagttggaggctcatcgttcctattcaggcagatgttatcgaggtccgacnnnnnnacttaaaaccgtcctaaacataaaaagatcggatacgcatgaggct

SEQ ID NO: 3945 - DNA, 146 bp, Artificial Sequence
  Bisulfite Padlock Probe
  misc_feature 92, 93, 94, 95, 96, 97: n = A,T,C or G
gactggaagagcactgttcaacgtcccgacaacctcaaataacgttggaggctcatcgttcctattcaggcagatgttatcgaggtccgacnnnnnnaaacctacctatcaacaaataaccgacccgatcggatacgcatgaggct

SEQ ID NO: 3946 - DNA, 146 bp, Artificial Sequence
  Bisulfite Padlock Probe
  misc_feature 95, 96, 97, 98, 99, 100: n = A,T,C or G
gactggaagagcactgttcaacgtcccgcccttccctacaataaaagttggaggctcatcgttcctattcaggcagatgttatcgaggtccgacnnnnnnacttaaaaccgtcctaaacgtaaaaagatcggatacgcatgaggct

SEQ ID NO: 3947 - DNA, 146 bp, Artificial Sequence
  Bisulfite Padlock Probe
  misc_feature 96, 97, 98, 99, 100, 101: n = A,T,C or G
gactggaagagcactgttcaacgtcgaacaaccacaaatactaaaaagttggaggctcatcgttcctattcaggcagatgttatcgaggtccgacnnnnnntattcctttacactcctccaaaattgatcggatacgcatgaggct

SEQ ID NO: 3948 - DNA, 146 bp, Artificial Sequence
  Bisulfite Padlock Probe
  misc_feature 96, 97, 98, 99, 100, 101: n = A,T,C or G
gactggaagagcactgttcaacgtcgaacaaccgcaaatactaaaaagttggaggctcatcgttcctattcaggcagatgttatcgaggtccgacnnnnnntattcctttacgctcctccaaaattgatcggatacgcatgaggct

SEQ ID NO: 3949 - DNA, 146 bp, Artificial Sequence
  Bisulfite Padlock Probe
  misc_feature 95, 96, 97, 98, 99, 100: n = A,T,C or G
gactggaagagcactgttcaactaaaaacaaacctaatttcctccagttggaggctcatcgttcctattcaggcagatgttatcgaggtccgacnnnnnnaaatacccgcacaccctacaatcctcgatcggatacgcatgaggct

SEQ ID NO: 3950 - DNA, 146 bp, Artificial Sequence
  Bisulfite Padlock Probe
  misc_feature 95, 96, 97, 98, 99, 100: n = A,T,C or G
gactggaagagcactgttcaactaaaaacaaacctaatttcctccagttggaggctcatcgttcctattcaggcagatgttatcgaggtccgacnnnnnnaaatacccgcgcaccctacaatcctcgatcggatacgcatgaggct

SEQ ID NO: 3951 - DNA, 146 bp, Artificial Sequence
  Bisulfite Padlock Probe
  misc_feature 94, 95, 96, 97, 98, 99: n = A,T,C or G
gactggaagagcactgttcaactaaaacaaaacccaactcccaccgttggaggctcatcgttcctattcaggcagatgttatcgaggtccgacnnnnnnctctacctaccgacgacgaccaaacaagatcggatacgcatgaggct

SEQ ID NO: 3952 - DNA, 146 bp, Artificial Sequence
  Bisulfite Padlock Probe
  misc_feature 94, 95, 96, 97, 98, 99: n = A,T,C or G
gactggaagagcactgttcaactaaaacgaaacccaactcccaccgttggaggctcatcgttcctattcaggcagatgttatcgaggtccgacnnnnnnctctacctaccgacgacgaccgaacaagatcggatacgcatgaggct

SEQ ID NO: 3953 - DNA, 146 bp, Artificial Sequence
  Bisulfite Padlock Probe
  misc_feature 96, 97, 98, 99, 100, 101: n = A,T,C or G
gactggaagagcactgttcaactaaaatctaatcatcctattccttcgttggaggctcatcgttcctattcaggcagatgttatcgaggtccgacnnnnnnacaacaacgacacaaatcaaacaccgatcggatacgcatgaggct

SEQ ID NO: 3954 - DNA, 146 bp, Artificial Sequence
  Bisulfite Padlock Probe
  misc_feature 96, 97, 98, 99, 100, 101: n = A,T,C or G
gactggaagagcactgttcaactaaaatctaatcatcctattccttcgttggaggctcatcgttcctattcaggcagatgttatcgaggtccgacnnnnnnacaacaacgacacaaatcgaacaccgatcggatacgcatgaggct

SEQ ID NO: 3955 - DNA, 146 bp, Artificial Sequence
  Bisulfite Padlock Probe
  misc_feature 96, 97, 98, 99, 100, 101: n = A,T,C or G
gactggaagagcactgttcaactaaacctcactcactcaccatacccgttggaggctcatcgttcctattcaggcagatgttatcgaggtccgacnnnnnnaccctacgcgcctaaaaccaaaaacgatcggatacgcatgaggct

SEQ ID NO: 3956 - DNA, 146 bp, Artificial Sequence
  Bisulfite Padlock Probe
  misc_feature 95, 96, 97, 98, 99, 100: n = A,T,C or G
gactggaagagcactgttcaactaaattaattacacactaaaacccgttggaggctcatcgttcctattcaggcagatgttatcgaggtccgacnnnnnncacacacacacacacacacacacacagatcggatacgcatgaggct

SEQ ID NO: 3957 - DNA, 146 bp, Artificial Sequence
  Bisulfite Padlock Probe
  misc_feature 95, 96, 97, 98, 99, 100: n = A,T,C or G
gactggaagagcactgttcaactacaacaacaacaaccccgacaacgttggaggctcatcgttcctattcaggcagatgttatcgaggtccgacnnnnnnaaaaacttcccgcgcaaaacaaaaacgatcggatacgcatgaggct

SEQ ID NO: 3958 - DNA, 146 bp, Artificial Sequence
  Bisulfite Padlock Probe
  misc_feature 95, 96, 97, 98, 99, 100: n = A,T,C or G
gactggaagagcactgttcaactacaacaacaacaaccccgacgacgttggaggctcatcgttcctattcaggcagatgttatcgaggtccgacnnnnnnaaaaacttcccgcgcgaaacaaaaacgatcggatacgcatgaggct

SEQ ID NO: 3959 - DNA, 146 bp, Artificial Sequence
  Bisulfite Padlock Probe
  misc_feature 93, 94, 95, 96, 97, 98: n = A,T,C or G
gactggaagagcactgttcaactacaactcataataacccaaccgttggaggctcatcgttcctattcaggcagatgttatcgaggtccgacnnnnnnaaaacgatacgtcgccaaaccaatatctgatcggatacgcatgaggct

SEQ ID NO: 3960 - DNA, 146 bp, Artificial Sequence
  Bisulfite Padlock Probe
  misc_feature 93, 94, 95, 96, 97, 98: n = A,T,C or G
gactggaagagcactgttcaactacaactccaactccacctcccgttggaggctcatcgttcctattcaggcagatgttatcgaggtccgacnnnnnnaatcccaactacaaaccctatccctaatgatcggatacgcatgaggct

SEQ ID NO: 3961 - DNA, 146 bp, Artificial Sequence
  Bisulfite Padlock Probe
  misc_feature 93, 94, 95, 96, 97, 98: n = A,T,C or G
gactggaagagcactgttcaactacaactccaactccgcctcccgttggaggctcatcgttcctattcaggcagatgttatcgaggtccgacnnnnnnaatcccaactacgaaccctatccctaatgatcggatacgcatgaggct

SEQ ID NO: 3962 - DNA, 146 bp, Artificial Sequence
  Bisulfite Padlock Probe
  misc_feature 93, 94, 95, 96, 97, 98: n = A,T,C or G
gactggaagagcactgttcaactacaactcgtaataacccaaccgttggaggctcatcgttcctattcaggcagatgttatcgaggtccgacnnnnnnaaaacgatacgtcgccaaaccgatatctgatcggatacgcatgaggct

SEQ ID NO: 3963 - DNA, 146 bp, Artificial Sequence
  Bisulfite Padlock Probe
  misc_feature 96, 97, 98, 99, 100, 101: n = A,T,C or G
gactggaagagcactgttcaactacgactactaaccctaaacaatcagttggaggctcatcgttcctattcaggcagatgttatcgaggtccgacnnnnnnaactaacgcgactacccgaaaacacgatcggatacgcatgaggct

SEQ ID NO: 3964 - DNA, 146 bp, Artificial Sequence
  Bisulfite Padlock Probe
  misc_feature 96, 97, 98, 99, 100, 101: n = A,T,C or G
gactggaagagcactgttcaactacgactactaaccctaaacgatcagttggaggctcatcgttcctattcaggcagatgttatcgaggtccgacnnnnnnaactaacgcgactacccgaaaacgcgatcggatacgcatgaggct

SEQ ID NO: 3965 - DNA, 146 bp, Artificial Sequence
  Bisulfite Padlock Probe
  misc_feature 96, 97, 98, 99, 100, 101: n = A,T,C or G
gactggaagagcactgttcaactactcccctctacaatacaacaaccgttggaggctcatcgttcctattcaggcagatgttatcgaggtccgacnnnnnnaaaaacctttcgaaccacaccgacagatcggatacgcatgaggct

SEQ ID NO: 3966 - DNA, 146 bp, Artificial Sequence
  Bisulfite Padlock Probe
  misc_feature 96, 97, 98, 99, 100, 101: n = A,T,C or G
gactggaagagcactgttcaactactcccctctacaatacaacaaccgttggaggctcatcgttcctattcaggcagatgttatcgaggtccgacnnnnnnaaaaacctttcgaaccacaccgacggatcggatacgcatgaggct

SEQ ID NO: 3967 - DNA, 146 bp, Artificial Sequence
  Bisulfite Padlock Probe
  misc_feature 92, 93, 94, 95, 96, 97: n = A,T,C or G
gactggaagagcactgttcaactactcccttaacaacatacacgttggaggctcatcgttcctattcaggcagatgttatcgaggtccgacnnnnnnccccacctcaactttaataactaaatctcgatcggatacgcatgaggct

SEQ ID NO: 3968 - DNA, 146 bp, Artificial Sequence
  Bisulfite Padlock Probe
  misc_feature 92, 93, 94, 95, 96, 97: n = A,T,C or G
gactggaagagcactgttcaactactcccttaacaacatacgcgttggaggctcatcgttcctattcaggcagatgttatcgaggtccgacnnnnnnccccacctcaactttaataactaaatctcgatcggatacgcatgaggct

SEQ ID NO: 3969 - DNA, 146 bp, Artificial Sequence
  Bisulfite Padlock Probe
  misc_feature 92, 93, 94, 95, 96, 97: n = A,T,C or G
gactggaagagcactgttcaactataacaactactattaccccgttggaggctcatcgttcctattcaggcagatgttatcgaggtccgacnnnnnnttccactactcgctaaccacacaaataccgatcggatacgcatgaggct

SEQ ID NO: 3970 - DNA, 146 bp, Artificial Sequence
  Bisulfite Padlock Probe
  misc_feature 92, 93, 94, 95, 96, 97: n = A,T,C or G
gactggaagagcactgttcaactataacaactactattaccccgttggaggctcatcgttcctattcaggcagatgttatcgaggtccgacnnnnnnttccactactcgctaaccacgcaaataccgatcggatacgcatgaggct

SEQ ID NO: 3971 - DNA, 146 bp, Artificial Sequence
  Bisulfite Padlock Probe
  misc_feature 93, 94, 95, 96, 97, 98: n = A,T,C or G
gactggaagagcactgttcaactcaaccaacaacttaaaataccgttggaggctcatcgttcctattcaggcagatgttatcgaggtccgacnnnnnnctatcaaactactaaaacaaaccacaaagatcggatacgcatgaggct

SEQ ID NO: 3972 - DNA, 146 bp, Artificial Sequence
  Bisulfite Padlock Probe
  misc_feature 93, 94, 95, 96, 97, 98: n = A,T,C or G
gactggaagagcactgttcaactcaaccaacgacttaaaataccgttggaggctcatcgttcctattcaggcagatgttatcgaggtccgacnnnnnnctatcaaactactaaaacgaaccacaaagatcggatacgcatgaggct

SEQ ID NO: 3973 - DNA, 146 bp, Artificial Sequence
  Bisulfite Padlock Probe
  misc_feature 96, 97, 98, 99, 100, 101: n = A,T,C or G
gactggaagagcactgttcaactcccccaacaacttaaaacctcaaagttggaggctcatcgttcctattcaggcagatgttatcgaggtccgacnnnnnncgaaaatccccatccctccctaaccgatcggatacgcatgaggct

SEQ ID NO: 3974 - DNA, 146 bp, Artificial Sequence
  Bisulfite Padlock Probe
  misc_feature 96, 97, 98, 99, 100, 101: n = A,T,C or G
gactggaagagcactgttcaactcccccgacaacttaaaacctcaaagttggaggctcatcgttcctattcaggcagatgttatcgaggtccgacnnnnnncgaaaatccccgtccctccctaaccgatcggatacgcatgaggct

SEQ ID NO: 3975 - DNA, 146 bp, Artificial Sequence
  Bisulfite Padlock Probe
  misc_feature 93, 94, 95, 96, 97, 98: n = A,T,C or G
gactggaagagcactgttcaactctaacctcctacatccaccccgttggaggctcatcgttcctattcaggcagatgttatcgaggtccgacnnnnnnccctcaaataaaaacaacttccatttccgatcggatacgcatgaggct

SEQ ID NO: 3976 - DNA, 146 bp, Artificial Sequence
  Bisulfite Padlock Probe
  misc_feature 93, 94, 95, 96, 97, 98: n = A,T,C or G
gactggaagagcactgttcaactctaacctcctacatccaccccgttggaggctcatcgttcctattcaggcagatgttatcgaggtccgacnnnnnnccctcaaataaaaacgacttccatttccgatcggatacgcatgaggct

SEQ ID NO: 3977 - DNA, 146 bp, Artificial Sequence
  Bisulfite Padlock Probe
  misc_feature 95, 96, 97, 98, 99, 100: n = A,T,C or G
gactggaagagcactgttcaactctataacaaacgcgaatcatatcgttggaggctcatcgttcctattcaggcagatgttatcgaggtccgacnnnnnnaatacgaaacaaaaacaatttaaaaagatcggatacgcatgaggct

SEQ ID NO: 3978 - DNA, 146 bp, Artificial Sequence
  Bisulfite Padlock Probe
  misc_feature 95, 96, 97, 98, 99, 100: n = A,T,C or G
gactggaagagcactgttcaactctataacaaacgcgaatcgtatcgttggaggctcatcgttcctattcaggcagatgttatcgaggtccgacnnnnnnaatacgaaacaaaaacgatttaaaaagatcggatacgcatgaggct

SEQ ID NO: 3979 - DNA, 146 bp, Artificial Sequence
  Bisulfite Padlock Probe
  misc_feature 96, 97, 98, 99, 100, 101: n = A,T,C or G
gactggaagagcactgttcaactctcgcctcctccttcccataattagttggaggctcatcgttcctattcaggcagatgttatcgaggtccgacnnnnnnacctcaaacgaaacgaaactaaacagatcggatacgcatgaggct

SEQ ID NO: 3980 - DNA, 146 bp, Artificial Sequence
  Bisulfite Padlock Probe
  misc_feature 96, 97, 98, 99, 100, 101: n = A,T,C or G
gactggaagagcactgttcaactctcgcctcctccttcccgtaattagttggaggctcatcgttcctattcaggcagatgttatcgaggtccgacnnnnnnacctcaaacgaaacgaaactaaacggatcggatacgcatgaggct

SEQ ID NO: 3981 - DNA, 146 bp, Artificial Sequence
  Bisulfite Padlock Probe
  misc_feature 96, 97, 98, 99, 100, 101: n = A,T,C or G
gactggaagagcactgttcaactcttaactccaccctctaatctaaagttggaggctcatcgttcctattcaggcagatgttatcgaggtccgacnnnnnnacccaaccgcaaaactaaaaactccgatcggatacgcatgaggct

SEQ ID NO: 3982 - DNA, 146 bp, Artificial Sequence
  Bisulfite Padlock Probe
  misc_feature 96, 97, 98, 99, 100, 101: n = A,T,C or G
gactggaagagcactgttcaactcttaactccgccctctaatctaaagttggaggctcatcgttcctattcaggcagatgttatcgaggtccgacnnnnnnacccaaccgcgaaactaaaaactccgatcggatacgcatgaggct

SEQ ID NO: 3983 - DNA, 146 bp, Artificial Sequence
  Bisulfite Padlock Probe
  misc_feature 95, 96, 97, 98, 99, 100: n = A,T,C or G
gactggaagagcactgttcaacttcaacgtaacataactattaaaagttggaggctcatcgttcctattcaggcagatgttatcgaggtccgacnnnnnnaaacgcgaacctaaaacccacaaaaagatcggatacgcatgaggct

SEQ ID NO: 3984 - DNA, 146 bp, Artificial Sequence
  Bisulfite Padlock Probe
  misc_feature 95, 96, 97, 98, 99, 100: n = A,T,C or G
gactggaagagcactgttcaacttcaacgtaacgtaactattaaaagttggaggctcatcgttcctattcaggcagatgttatcgaggtccgacnnnnnnaaacgcgaacctaaaacccgcaaaaagatcggatacgcatgaggct

SEQ ID NO: 3985 - DNA, 146 bp, Artificial Sequence
  Bisulfite Padlock Probe
  misc_feature 94, 95, 96, 97, 98, 99: n = A,T,C or G
gactggaagagcactgttcaacttcaatcccctcctctccaacccgttggaggctcatcgttcctattcaggcagatgttatcgaggtccgacnnnnnncgacccaaaacgcaaatatacgcaaccgatcggatacgcatgaggct

SEQ ID NO: 3986 - DNA, 146 bp, Artificial Sequence
  Bisulfite Padlock Probe
  misc_feature 94, 95, 96, 97, 98, 99: n = A,T,C or G
gactggaagagcactgttcaacttcaatcccctcctctccaacccgttggaggctcatcgttcctattcaggcagatgttatcgaggtccgacnnnnnncgacccaaaacgcaaatatacgcgaccgatcggatacgcatgaggct

SEQ ID NO: 3987 - DNA, 146 bp, Artificial Sequence
  Bisulfite Padlock Probe
  misc_feature 95, 96, 97, 98, 99, 100: n = A,T,C or G
gactggaagagcactgttcaacttcccaaaacctcaataacaactagttggaggctcatcgttcctattcaggcagatgttatcgaggtccgacnnnnnntaccaaacaccaaaatacttaaatccgatcggatacgcatgaggct

SEQ ID NO: 3988 - DNA, 146 bp, Artificial Sequence
  Bisulfite Padlock Probe
  misc_feature 95, 96, 97, 98, 99, 100: n = A,T,C or G
gactggaagagcactgttcaacttcccaaaacctcaataacaactagttggaggctcatcgttcctattcaggcagatgttatcgaggtccgacnnnnnntaccaaacgccaaaatacttaaatccgatcggatacgcatgaggct

SEQ ID NO: 3989 - DNA, 146 bp, Artificial Sequence
  Bisulfite Padlock Probe
  misc_feature 93, 94, 95, 96, 97, 98: n = A,T,C or G
gactggaagagcactgttcaactttaacccaaccactccctaatgttggaggctcatcgttcctattcaggcagatgttatcgaggtccgacnnnnnncaacgacaacgcaaaataaaactataccgatcggatacgcatgaggct

SEQ ID NO: 3990 - DNA, 146 bp, Artificial Sequence
  Bisulfite Padlock Probe
  misc_feature 93, 94, 95, 96, 97, 98: n = A,T,C or G
gactggaagagcactgttcaactttaacccaaccactccctaatgttggaggctcatcgttcctattcaggcagatgttatcgaggtccgacnnnnnncaacgacaacgcgaaataaaactataccgatcggatacgcatgaggct

SEQ ID NO: 3991 - DNA, 146 bp, Artificial Sequence
  Bisulfite Padlock Probe
  misc_feature 94, 95, 96, 97, 98, 99: n = A,T,C or G
gactggaagagcactgttcaataaaaataccttaaatctcccaatgttggaggctcatcgttcctattcaggcagatgttatcgaggtccgacnnnnnnccaacaaaatatattctatctccacacgatcggatacgcatgaggct

SEQ ID NO: 3992 - DNA, 146 bp, Artificial Sequence
  Bisulfite Padlock Probe
  misc_feature 94, 95, 96, 97, 98, 99: n = A,T,C or G
gactggaagagcactgttcaataaaaataccttaaatctcccgatgttggaggctcatcgttcctattcaggcagatgttatcgaggtccgacnnnnnnccaacaaaatatattctatctccacacgatcggatacgcatgaggct

SEQ ID NO: 3993 - DNA, 146 bp, Artificial Sequence
  Bisulfite Padlock Probe
  misc_feature 92, 93, 94, 95, 96, 97: n = A,T,C or G
gactggaagagcactgttcaataaaactaatcaaatctaccccgttggaggctcatcgttcctattcaggcagatgttatcgaggtccgacnnnnnncccaaacccacttcctatcactccaaaaagatcggatacgcatgaggct

SEQ ID NO: 3994 - DNA, 146 bp, Artificial Sequence
  Bisulfite Padlock Probe
  misc_feature 93, 94, 95, 96, 97, 98: n = A,T,C or G
gactggaagagcactgttcaataaaactttataaaaatacaaacgttggaggctcatcgttcctattcaggcagatgttatcgaggtccgacnnnnnnccaacaaaactaaaccccctactctctcgatcggatacgcatgaggct

SEQ ID NO: 3995 - DNA, 146 bp, Artificial Sequence
  Bisulfite Padlock Probe
  misc_feature 95, 96, 97, 98, 99, 100: n = A,T,C or G
gactggaagagcactgttcaataaaatctctttaaacaataacattgttggaggctcatcgttcctattcaggcagatgttatcgaggtccgacnnnnnntaatttctactatatcattactttcagatcggatacgcatgaggct

SEQ ID NO: 3996 - DNA, 146 bp, Artificial Sequence
  Bisulfite Padlock Probe
  misc_feature 96, 97, 98, 99, 100, 101: n = A,T,C or G
gactggaagagcactgttcaataaacaacaacaaatcctcccaactcgttggaggctcatcgttcctattcaggcagatgttatcgaggtccgacnnnnnnctactaccgccgcgaccacaaaatagatcggatacgcatgaggct

SEQ ID NO: 3997 - DNA, 146 bp, Artificial Sequence
  Bisulfite Padlock Probe
  misc_feature 96, 97, 98, 99, 100, 101: n = A,T,C or G
gactggaagagcactgttcaataaacaacaacaaatcctcccaactcgttggaggctcatcgttcctattcaggcagatgttatcgaggtccgacnnnnnnctactaccgccgcgaccgcaaaatagatcggatacgcatgaggct

SEQ ID NO: 3998 - DNA, 146 bp, Artificial Sequence
  Bisulfite Padlock Probe
  misc_feature 94, 95, 96, 97, 98, 99: n = A,T,C or G
gactggaagagcactgttcaataaacacaacctactaaaatctaagttggaggctcatcgttcctattcaggcagatgttatcgaggtccgacnnnnnncttctactcctccaaaacaaacaaaaagatcggatacgcatgaggct

SEQ ID NO: 3999 - DNA, 146 bp, Artificial Sequence
  Bisulfite Padlock Probe
  misc_feature 94, 95, 96, 97, 98, 99: n = A,T,C or G
gactggaagagcactgttcaataaacacgacctactaaaatctaagttggaggctcatcgttcctattcaggcagatgttatcgaggtccgacnnnnnncttctactcctccgaaacaaacaaaaagatcggatacgcatgaggct

SEQ ID NO: 4000 - DNA, 146 bp, Artificial Sequence
  Bisulfite Padlock Probe
  misc_feature 92, 93, 94, 95, 96, 97: n = A,T,C or G
gactggaagagcactgttcaataaacccgactaaacctcaaccgttggaggctcatcgttcctattcaggcagatgttatcgaggtccgacnnnnnnaaaaataaaaacatcttctccaaaaccaagatcggatacgcatgaggct

SEQ ID NO: 4001 - DNA, 146 bp, Artificial Sequence
  Bisulfite Padlock Probe
  misc_feature 92, 93, 94, 95, 96, 97: n = A,T,C or G
gactggaagagcactgttcaataaacccgactaaacctcgaccgttggaggctcatcgttcctattcaggcagatgttatcgaggtccgacnnnnnnaaaaataaaaacgtcttctccaaaaccaagatcggatacgcatgaggct

SEQ ID NO: 4002 - DNA, 146 bp, Artificial Sequence
  Bisulfite Padlock Probe
  misc_feature 95, 96, 97, 98, 99, 100: n = A,T,C or G
gactggaagagcactgttcaataaataaaataaccatctaaatctcgttggaggctcatcgttcctattcaggcagatgttatcgaggtccgacnnnnnnaaaaacaatataaaaatcccaaccccgatcggatacgcatgaggct

SEQ ID NO: 4003 - DNA, 146 bp, Artificial Sequence
  Bisulfite Padlock Probe
  misc_feature 94, 95, 96, 97, 98, 99: n = A,T,C or G
gactggaagagcactgttcaataaataccccaacgaaccaatcccgttggaggctcatcgttcctattcaggcagatgttatcgaggtccgacnnnnnnaaaataacactcaaacttaaaacaaaagatcggatacgcatgaggct

SEQ ID NO: 4004 - DNA, 146 bp, Artificial Sequence
  Bisulfite Padlock Probe
  misc_feature 94, 95, 96, 97, 98, 99: n = A,T,C or G
gactggaagagcactgttcaataaataccccaacgaaccgatcccgttggaggctcatcgttcctattcaggcagatgttatcgaggtccgacnnnnnnaaaataacactcgaacttaaaacaaaagatcggatacgcatgaggct

SEQ ID NO: 4005 - DNA, 146 bp, Artificial Sequence
  Bisulfite Padlock Probe
  misc_feature 94, 95, 96, 97, 98, 99: n = A,T,C or G
gactggaagagcactgttcaataacgatacccctaccgacataacgttggaggctcatcgttcctattcaggcagatgttatcgaggtccgacnnnnnnacaaacacctaataacaaaaataaaaagatcggatacgcatgaggct

SEQ ID NO: 4006 - DNA, 146 bp, Artificial Sequence
  Bisulfite Padlock Probe
  misc_feature 94, 95, 96, 97, 98, 99: n = A,T,C or G
gactggaagagcactgttcaataacgatacccctaccgacgtaacgttggaggctcatcgttcctattcaggcagatgttatcgaggtccgacnnnnnnacaaacacctaataacaaaaataaaaagatcggatacgcatgaggct

SEQ ID NO: 4007 - DNA, 146 bp, Artificial Sequence
  Bisulfite Padlock Probe
  misc_feature 95, 96, 97, 98, 99, 100: n = A,T,C or G
gactggaagagcactgttcaataactatctcaatcaccctcacctagttggaggctcatcgttcctattcaggcagatgttatcgaggtccgacnnnnnnccaatccccttcacctactccccaacgatcggatacgcatgaggct

SEQ ID NO: 4008 - DNA, 146 bp, Artificial Sequence
  Bisulfite Padlock Probe
  misc_feature 93, 94, 95, 96, 97, 98: n = A,T,C or G
gactggaagagcactgttcaataataaaccctaacctcacacacgttggaggctcatcgttcctattcaggcagatgttatcgaggtccgacnnnnnnaatatctctaaaataacaaccctcccaagatcggatacgcatgaggct

SEQ ID NO: 4009 - DNA, 146 bp, Artificial Sequence
  Bisulfite Padlock Probe
  misc_feature 93, 94, 95, 96, 97, 98: n = A,T,C or G
gactggaagagcactgttcaataataaaccctaacctcacacgcgttggaggctcatcgttcctattcaggcagatgttatcgaggtccgacnnnnnnaatatctctaaaataacgaccctcccaagatcggatacgcatgaggct

SEQ ID NO: 4010 - DNA, 146 bp, Artificial Sequence
  Bisulfite Padlock Probe
  misc_feature 93, 94, 95, 96, 97, 98: n = A,T,C or G
gactggaagagcactgttcaatacacttaactaaataaaaatctgttggaggctcatcgttcctattcaggcagatgttatcgaggtccgacnnnnnnaaaaaccccgcaccttctaaaaacaaccgatcggatacgcatgaggct

SEQ ID NO: 4011 - DNA, 146 bp, Artificial Sequence
  Bisulfite Padlock Probe
  misc_feature 93, 94, 95, 96, 97, 98: n = A,T,C or G
gactggaagagcactgttcaataccgaaccctaacacacctaccgttggaggctcatcgttcctattcaggcagatgttatcgaggtccgacnnnnnncctccccatactatccccaatatcctaagatcggatacgcatgaggct

SEQ ID NO: 4012 - DNA, 146 bp, Artificial Sequence
  Bisulfite Padlock Probe
  misc_feature 93, 94, 95, 96, 97, 98: n = A,T,C or G
gactggaagagcactgttcaataccgaaccctaacgcacctaccgttggaggctcatcgttcctattcaggcagatgttatcgaggtccgacnnnnnncctccccgtactatccccaatatcctaagatcggatacgcatgaggct

SEQ ID NO: 4013 - DNA, 146 bp, Artificial Sequence
  Bisulfite Padlock Probe
  misc_feature 93, 94, 95, 96, 97, 98: n = A,T,C or G
gactggaagagcactgttcaatacgcttaactaaataaaaatctgttggaggctcatcgttcctattcaggcagatgttatcgaggtccgacnnnnnnaaaaaccccgcgccttctaaaaacaaccgatcggatacgcatgaggct

SEQ ID NO: 4014 - DNA, 146 bp, Artificial Sequence
  Bisulfite Padlock Probe
  misc_feature 94, 95, 96, 97, 98, 99: n = A,T,C or G
gactggaagagcactgttcaatactaactaaatcttaaatccaaagttggaggctcatcgttcctattcaggcagatgttatcgaggtccgacnnnnnncaaaaataaaaatacatacacctaatagatcggatacgcatgaggct

SEQ ID NO: 4015 - DNA, 146 bp, Artificial Sequence
  Bisulfite Padlock Probe
  misc_feature 94, 95, 96, 97, 98, 99: n = A,T,C or G
gactggaagagcactgttcaatactaactaaatcttaaatccaaagttggaggctcatcgttcctattcaggcagatgttatcgaggtccgacnnnnnncaaaaataaaaatacgtacacctaatagatcggatacgcatgaggct

SEQ ID NO: 4016 - DNA, 146 bp, Artificial Sequence
  Bisulfite Padlock Probe
  misc_feature 94, 95, 96, 97, 98, 99: n = A,T,C or G
gactggaagagcactgttcaatataacttacaaacaatttccccagttggaggctcatcgttcctattcaggcagatgttatcgaggtccgacnnnnnncccaacccctccctaaactacataaccgatcggatacgcatgaggct

SEQ ID NO: 4017 - DNA, 146 bp, Artificial Sequence
  Bisulfite Padlock Probe
  misc_feature 94, 95, 96, 97, 98, 99: n = A,T,C or G
gactggaagagcactgttcaatataacttacaaacaatttccccagttggaggctcatcgttcctattcaggcagatgttatcgaggtccgacnnnnnncccgacccctccctaaactacataaccgatcggatacgcatgaggct

SEQ ID NO: 4018 - DNA, 146 bp, Artificial Sequence
  Bisulfite Padlock Probe
  misc_feature 93, 94, 95, 96, 97, 98: n = A,T,C or G
gactggaagagcactgttcaatatacgcgtccttcgcaaaaaacgttggaggctcatcgttcctattcaggcagatgttatcgaggtccgacnnnnnnacgaaaaacgataaacgcataaaccaacgatcggatacgcatgaggct

SEQ ID NO: 4019 - DNA, 146 bp, Artificial Sequence
  Bisulfite Padlock Probe
  misc_feature 93, 94, 95, 96, 97, 98: n = A,T,C or G
gactggaagagcactgttcaatatacgcgtccttcgcgaaaaacgttggaggctcatcgttcctattcaggcagatgttatcgaggtccgacnnnnnnacgaaaaacgataaacgcgtaaaccaacgatcggatacgcatgaggct

SEQ ID NO: 4020 - DNA, 146 bp, Artificial Sequence
  Bisulfite Padlock Probe
  misc_feature 92, 93, 94, 95, 96, 97: n = A,T,C or G
gactggaagagcactgttcaatcaaaaaactaaaaattaaaacgttggaggctcatcgttcctattcaggcagatgttatcgaggtccgacnnnnnntaacttaaaacaaattccttacccactctgatcggatacgcatgaggct

SEQ ID NO: 4021 - DNA, 146 bp, Artificial Sequence
  Bisulfite Padlock Probe
  misc_feature 92, 93, 94, 95, 96, 97: n = A,T,C or G
gactggaagagcactgttcaatcgaaaaactaaaaattaaaacgttggaggctcatcgttcctattcaggcagatgttatcgaggtccgacnnnnnntaacttaaaacgaattccttacccactctgatcggatacgcatgaggct

SEQ ID NO: 4022 - DNA, 146 bp, Artificial Sequence
  Bisulfite Padlock Probe
  misc_feature 92, 93, 94, 95, 96, 97: n = A,T,C or G
gactggaagagcactgttcaatctacacaacccgaaaacaaaagttggaggctcatcgttcctattcaggcagatgttatcgaggtccgacnnnnnnaaaaatatcaactccaacaactccaaaacgatcggatacgcatgaggct

SEQ ID NO: 4023 - DNA, 146 bp, Artificial Sequence
  Bisulfite Padlock Probe
  misc_feature 92, 93, 94, 95, 96, 97: n = A,T,C or G
gactggaagagcactgttcaatctacacaacccgaaaacgaaagttggaggctcatcgttcctattcaggcagatgttatcgaggtccgacnnnnnnaaaaatatcaactccaacgactccaaaacgatcggatacgcatgaggct

SEQ ID NO: 4024 - DNA, 146 bp, Artificial Sequence
  Bisulfite Padlock Probe
  misc_feature 93, 94, 95, 96, 97, 98: n = A,T,C or G
gactggaagagcactgttcaatctacgaccatcctacacaatacgttggaggctcatcgttcctattcaggcagatgttatcgaggtccgacnnnnnntcccttccacttctctcaaatacatacagatcggatacgcatgaggct

SEQ ID NO: 4025 - DNA, 146 bp, Artificial Sequence
  Bisulfite Padlock Probe
  misc_feature 93, 94, 95, 96, 97, 98: n = A,T,C or G
gactggaagagcactgttcaatctacgaccgtcctacacaatacgttggaggctcatcgttcctattcaggcagatgttatcgaggtccgacnnnnnntcccttccacttctctcaaatacatacagatcggatacgcatgaggct

SEQ ID NO: 4026 - DNA, 146 bp, Artificial Sequence
  Bisulfite Padlock Probe
  misc_feature 96, 97, 98, 99, 100, 101: n = A,T,C or G
gactggaagagcactgttcaatctcttaaatactctatatccacaacgttggaggctcatcgttcctattcaggcagatgttatcgaggtccgacnnnnnncgaaatcgaaattaaaaccaaaaaagatcggatacgcatgaggct

SEQ ID NO: 4027 - DNA, 146 bp, Artificial Sequence
  Bisulfite Padlock Probe
  misc_feature 96, 97, 98, 99, 100, 101: n = A,T,C or G
gactggaagagcactgttcaatctcttaaatactctatatccacaacgttggaggctcatcgttcctattcaggcagatgttatcgaggtccgacnnnnnncgaaatcgaaattaaaaccgaaaaagatcggatacgcatgaggct

SEQ ID NO: 4028 - DNA, 146 bp, Artificial Sequence
  Bisulfite Padlock Probe
  misc_feature 92, 93, 94, 95, 96, 97: n = A,T,C or G
gactggaagagcactgttcaattacccgacactaccaaactctgttggaggctcatcgttcctattcaggcagatgttatcgaggtccgacnnnnnncccttatctaaccacatcaccctccttcagatcggatacgcatgaggct

SEQ ID NO: 4029 - DNA, 146 bp, Artificial Sequence
  Bisulfite Padlock Probe
  misc_feature 92, 93, 94, 95, 96, 97: n = A,T,C or G
gactggaagagcactgttcaattacccgacgctaccaaactctgttggaggctcatcgttcctattcaggcagatgttatcgaggtccgacnnnnnncccttatctaaccacgtcaccctccttcagatcggatacgcatgaggct

SEQ ID NO: 4030 - DNA, 146 bp, Artificial Sequence
  Bisulfite Padlock Probe
  misc_feature 93, 94, 95, 96, 97, 98: n = A,T,C or G
gactggaagagcactgttcaattccacaacctctaaactaaactgttggaggctcatcgttcctattcaggcagatgttatcgaggtccgacnnnnnnattctctaaccaacttttctaaaaacaagatcggatacgcatgaggct

SEQ ID NO: 4031 - DNA, 146 bp, Artificial Sequence
  Bisulfite Padlock Probe
  misc_feature 93, 94, 95, 96, 97, 98: n = A,T,C or G
gactggaagagcactgttcaattccacgacctctaaactaaactgttggaggctcatcgttcctattcaggcagatgttatcgaggtccgacnnnnnnattctctaaccgacttttctaaaaacaagatcggatacgcatgaggct

SEQ ID NO: 4032 - DNA, 146 bp, Artificial Sequence
  Bisulfite Padlock Probe
  misc_feature 95, 96, 97, 98, 99, 100: n = A,T,C or G
gactggaagagcactgttcaatttcctaaacaataaccaataactagttggaggctcatcgttcctattcaggcagatgttatcgaggtccgacnnnnnnccgcctccgaactaaaacactaaaacgatcggatacgcatgaggct

SEQ ID NO: 4033 - DNA, 146 bp, Artificial Sequence
  Bisulfite Padlock Probe
  misc_feature 95, 96, 97, 98, 99, 100: n = A,T,C or G
gactggaagagcactgttcaatttcctaaacaataaccaataactagttggaggctcatcgttcctattcaggcagatgttatcgaggtccgacnnnnnnccgcctccgaactaaaacgctaaaacgatcggatacgcatgaggct

SEQ ID NO: 4034 - DNA, 146 bp, Artificial Sequence
  Bisulfite Padlock Probe
  misc_feature 92, 93, 94, 95, 96, 97: n = A,T,C or G
gactggaagagcactgttcacaaaacacactaaatttaccctcgttggaggctcatcgttcctattcaggcagatgttatcgaggtccgacnnnnnncatcaccactaaaattacacccaaaaatcgatcggatacgcatgaggct

SEQ ID NO: 4035 - DNA, 146 bp, Artificial Sequence
  Bisulfite Padlock Probe
  misc_feature 92, 93, 94, 95, 96, 97: n = A,T,C or G
gactggaagagcactgttcacaaaacacgctaaatttaccctcgttggaggctcatcgttcctattcaggcagatgttatcgaggtccgacnnnnnncatcgccactaaaattacacccaaaaatcgatcggatacgcatgaggct

SEQ ID NO: 4036 - DNA, 146 bp, Artificial Sequence
  Bisulfite Padlock Probe
  misc_feature 94, 95, 96, 97, 98, 99: n = A,T,C or G
gactggaagagcactgttcacaaaaccaaaatactaaacactccagttggaggctcatcgttcctattcaggcagatgttatcgaggtccgacnnnnnnaccaacaaaaatcatctcgtccttcacgatcggatacgcatgaggct

SEQ ID NO: 4037 - DNA, 146 bp, Artificial Sequence
  Bisulfite Padlock Probe
  misc_feature 94, 95, 96, 97, 98, 99: n = A,T,C or G
gactggaagagcactgttcacaaaaccgaaatactaaacactccagttggaggctcatcgttcctattcaggcagatgttatcgaggtccgacnnnnnnaccaacaaaaatcatctcgtccttcgcgatcggatacgcatgaggct

SEQ ID NO: 4038 - DNA, 146 bp, Artificial Sequence
  Bisulfite Padlock Probe
  misc_feature 94, 95, 96, 97, 98, 99: n = A,T,C or G
gactggaagagcactgttcacaaaactaaattcccaaattaaatcgttggaggctcatcgttcctattcaggcagatgttatcgaggtccgacnnnnnncaaactaaaaacacccaaaaccaaaacgatcggatacgcatgaggct

SEQ ID NO: 4039 - DNA, 146 bp, Artificial Sequence
  Bisulfite Padlock Probe
  misc_feature 94, 95, 96, 97, 98, 99: n = A,T,C or G
gactggaagagcactgttcacaaaactaaattcccaaattaaatcgttggaggctcatcgttcctattcaggcagatgttatcgaggtccgacnnnnnncaaactaaaaacacccgaaaccaaaacgatcggatacgcatgaggct

SEQ ID NO: 4040 - DNA, 146 bp, Artificial Sequence
  Bisulfite Padlock Probe
  misc_feature 96, 97, 98, 99, 100, 101: n = A,T,C or G
gactggaagagcactgttcacaaacaaacctattaaccattcaaaccgttggaggctcatcgttcctattcaggcagatgttatcgaggtccgacnnnnnnccatttcccaacaaacctccaaaaagatcggatacgcatgaggct

SEQ ID NO: 4041 - DNA, 146 bp, Artificial Sequence
  Bisulfite Padlock Probe
  misc_feature 96, 97, 98, 99, 100, 101: n = A,T,C or G
gactggaagagcactgttcacaaacaaacgaaacgaactctcaaaaagttggaggctcatcgttcctattcaggcagatgttatcgaggtccgacnnnnnntcctcatctcgaatacgccaccaaagatcggatacgcatgaggct

SEQ ID NO: 4042 - DNA, 146 bp, Artificial Sequence
  Bisulfite Padlock Probe
  misc_feature 96, 97, 98, 99, 100, 101: n = A,T,C or G
gactggaagagcactgttcacaaacaaacgaaacgaactctcgaaaagttggaggctcatcgttcctattcaggcagatgttatcgaggtccgacnnnnnntcctcatctcgaatacgccgccaaagatcggatacgcatgaggct

SEQ ID NO: 4043 - DNA, 146 bp, Artificial Sequence
  Bisulfite Padlock Probe
  misc_feature 93, 94, 95, 96, 97, 98: n = A,T,C or G
gactggaagagcactgttcacaaacaccttaaaaccctaacaacgttggaggctcatcgttcctattcaggcagatgttatcgaggtccgacnnnnnnaaatcccaatccacaaaattaaaaattcgatcggatacgcatgaggct

SEQ ID NO: 4044 - DNA, 146 bp, Artificial Sequence
  Bisulfite Padlock Probe
  misc_feature 93, 94, 95, 96, 97, 98: n = A,T,C or G
gactggaagagcactgttcacaaacaccttaaaaccctaacgacgttggaggctcatcgttcctattcaggcagatgttatcgaggtccgacnnnnnnaaatcccaatccgcaaaattaaaaattcgatcggatacgcatgaggct

SEQ ID NO: 4045 - DNA, 146 bp, Artificial Sequence
  Bisulfite Padlock Probe
  misc_feature 92, 93, 94, 95, 96, 97: n = A,T,C or G
gactggaagagcactgttcacaaacgtaaccgccaacgatcacgttggaggctcatcgttcctattcaggcagatgttatcgaggtccgacnnnnnncgataaacaacacgctaacatacatactagatcggatacgcatgaggct

SEQ ID NO: 4046 - DNA, 146 bp, Artificial Sequence
  Bisulfite Padlock Probe
  misc_feature 92, 93, 94, 95, 96, 97: n = A,T,C or G
gactggaagagcactgttcacaaacgtaaccgccaacgatcgcgttggaggctcatcgttcctattcaggcagatgttatcgaggtccgacnnnnnncgataaacaacacgctaacgtacatactagatcggatacgcatgaggct

SEQ ID NO: 4047 - DNA, 146 bp, Artificial Sequence
  Bisulfite Padlock Probe
  misc_feature 96, 97, 98, 99, 100, 101: n = A,T,C or G
gactggaagagcactgttcacaaataaaccgaaaaccaaacaaatacgttggaggctcatcgttcctattcaggcagatgttatcgaggtccgacnnnnnncttcctcaccgaccgcttcaaaaacgatcggatacgcatgaggct

SEQ ID NO: 4048 - DNA, 146 bp, Artificial Sequence
  Bisulfite Padlock Probe
  misc_feature 96, 97, 98, 99, 100, 101: n = A,T,C or G
gactggaagagcactgttcacaaataaaccgaaaaccgaacaaatacgttggaggctcatcgttcctattcaggcagatgttatcgaggtccgacnnnnnncttcctcaccgaccgcttcgaaaacgatcggatacgcatgaggct

SEQ ID NO: 4049 - DNA, 146 bp, Artificial Sequence
  Bisulfite Padlock Probe
  misc_feature 95, 96, 97, 98, 99, 100: n = A,T,C or G
gactggaagagcactgttcacaacaatacaaacacttaacattaccgttggaggctcatcgttcctattcaggcagatgttatcgaggtccgacnnnnnntaaatttaatccctaaactactctccgatcggatacgcatgaggct

SEQ ID NO: 4050 - DNA, 146 bp, Artificial Sequence
  Bisulfite Padlock Probe
  misc_feature 95, 96, 97, 98, 99, 100: n = A,T,C or G
gactggaagagcactgttcacaacaatacaaacgcttaacattaccgttggaggctcatcgttcctattcaggcagatgttatcgaggtccgacnnnnnntaaatttaatccctaaactactctccgatcggatacgcatgaggct

SEQ ID NO: 4051 - DNA, 146 bp, Artificial Sequence
  Bisulfite Padlock Probe
  misc_feature 96, 97, 98, 99, 100, 101: n = A,T,C or G
gactggaagagcactgttcacaacctcctacttaaaaattactacaagttggaggctcatcgttcctattcaggcagatgttatcgaggtccgacnnnnnnaccctctaccgccaaaaaacaccaagatcggatacgcatgaggct

SEQ ID NO: 4052 - DNA, 146 bp, Artificial Sequence
  Bisulfite Padlock Probe
  misc_feature 96, 97, 98, 99, 100, 101: n = A,T,C or G
gactggaagagcactgttcacaacctcctacttaaaaattactacaagttggaggctcatcgttcctattcaggcagatgttatcgaggtccgacnnnnnnaccctctaccgccgaaaaacaccaagatcggatacgcatgaggct

SEQ ID NO: 4053 - DNA, 146 bp, Artificial Sequence
  Bisulfite Padlock Probe
  misc_feature 96, 97, 98, 99, 100, 101: n = A,T,C or G
gactggaagagcactgttcacaactaccacctcacttacctcaacacgttggaggctcatcgttcctattcaggcagatgttatcgaggtccgacnnnnnnaccctacaaaacttccaaactctaagatcggatacgcatgaggct

SEQ ID NO: 4054 - DNA, 146 bp, Artificial Sequence
  Bisulfite Padlock Probe
  misc_feature 96, 97, 98, 99, 100, 101: n = A,T,C or G
gactggaagagcactgttcacaactaccgcctcacttacctcaacacgttggaggctcatcgttcctattcaggcagatgttatcgaggtccgacnnnnnnaccctacaaaacttccgaactctaagatcggatacgcatgaggct

SEQ ID NO: 4055 - DNA, 146 bp, Artificial Sequence
  Bisulfite Padlock Probe
  misc_feature 93, 94, 95, 96, 97, 98: n = A,T,C or G
gactggaagagcactgttcacaatcacttaaacctttcccaaaagttggaggctcatcgttcctattcaggcagatgttatcgaggtccgacnnnnnnaaaatatatataaacaactaaatttattgatcggatacgcatgaggct

SEQ ID NO: 4056 - DNA, 146 bp, Artificial Sequence
  Bisulfite Padlock Probe
  misc_feature 93, 94, 95, 96, 97, 98: n = A,T,C or G
gactggaagagcactgttcacaatcacttaaacctttcccgaaagttggaggctcatcgttcctattcaggcagatgttatcgaggtccgacnnnnnnaaaatatatataaacaactaaatttattgatcggatacgcatgaggct

SEQ ID NO: 4057 - DNA, 146 bp, Artificial Sequence
  Bisulfite Padlock Probe
  misc_feature 96, 97, 98, 99, 100, 101: n = A,T,C or G
gactggaagagcactgttcacaatcttaaaaccatcccataaccctcgttggaggctcatcgttcctattcaggcagatgttatcgaggtccgacnnnnnnaaaaacactaacaaacaatcccctcgatcggatacgcatgaggct

SEQ ID NO: 4058 - DNA, 146 bp, Artificial Sequence
  Bisulfite Padlock Probe
  misc_feature 96, 97, 98, 99, 100, 101: n = A,T,C or G
gactggaagagcactgttcacaatcttaaaaccatcccgtaaccctcgttggaggctcatcgttcctattcaggcagatgttatcgaggtccgacnnnnnnaaaaacactaacaaacaatcccctcgatcggatacgcatgaggct

SEQ ID NO: 4059 - DNA, 146 bp, Artificial Sequence
  Bisulfite Padlock Probe
  misc_feature 95, 96, 97, 98, 99, 100: n = A,T,C or G
gactggaagagcactgttcacacaaacgcatataaaattaactaccgttggaggctcatcgttcctattcaggcagatgttatcgaggtccgacnnnnnnactacaccctctttaaaataaaacccgatcggatacgcatgaggct

SEQ ID NO: 4060 - DNA, 146 bp, Artificial Sequence
  Bisulfite Padlock Probe
  misc_feature 95, 96, 97, 98, 99, 100: n = A,T,C or G
gactggaagagcactgttcacacaaacgcgtataaaattaactaccgttggaggctcatcgttcctattcaggcagatgttatcgaggtccgacnnnnnnactacgccctctttaaaataaaacccgatcggatacgcatgaggct

SEQ ID NO: 4061 - DNA, 146 bp, Artificial Sequence
  Bisulfite Padlock Probe
  misc_feature 95, 96, 97, 98, 99, 100: n = A,T,C or G
gactggaagagcactgttcacacacaatatcctaaaataaaatacagttggaggctcatcgttcctattcaggcagatgttatcgaggtccgacnnnnnncaaaatttacaataaacacccaaaaagatcggatacgcatgaggct

SEQ ID NO: 4062 - DNA, 146 bp, Artificial Sequence
  Bisulfite Padlock Probe
  misc_feature 93, 94, 95, 96, 97, 98: n = A,T,C or G
gactggaagagcactgttcacacacataccactcacccaaacttgttggaggctcatcgttcctattcaggcagatgttatcgaggtccgacnnnnnnataaaaccgctcaaaactcccaaactacgatcggatacgcatgaggct

SEQ ID NO: 4063 - DNA, 146 bp, Artificial Sequence
  Bisulfite Padlock Probe
  misc_feature 93, 94, 95, 96, 97, 98: n = A,T,C or G
gactggaagagcactgttcacacacataccactcgcccaaacttgttggaggctcatcgttcctattcaggcagatgttatcgaggtccgacnnnnnnataaaaccgctcaaaactcccgaactacgatcggatacgcatgaggct

SEQ ID NO: 4064 - DNA, 146 bp, Artificial Sequence
  Bisulfite Padlock Probe
  misc_feature 95, 96, 97, 98, 99, 100: n = A,T,C or G
gactggaagagcactgttcacacacgatatcctaaaataaaatacagttggaggctcatcgttcctattcaggcagatgttatcgaggtccgacnnnnnncaaaatttacaataaacgcccaaaaagatcggatacgcatgaggct

SEQ ID NO: 4065 - DNA, 146 bp, Artificial Sequence
  Bisulfite Padlock Probe
  misc_feature 92, 93, 94, 95, 96, 97: n = A,T,C or G
gactggaagagcactgttcacacacgtacaccaacaaaaacaagttggaggctcatcgttcctattcaggcagatgttatcgaggtccgacnnnnnnaaaccaaaaccaactacccttaaatcaaagatcggatacgcatgaggct

SEQ ID NO: 4066 - DNA, 146 bp, Artificial Sequence
  Bisulfite Padlock Probe
  misc_feature 92, 93, 94, 95, 96, 97: n = A,T,C or G
gactggaagagcactgttcacacacgtacaccaacaaaaacgagttggaggctcatcgttcctattcaggcagatgttatcgaggtccgacnnnnnnaaaccaaaaccaactacccttaaatcaaagatcggatacgcatgaggct

SEQ ID NO: 4067 - DNA, 146 bp, Artificial Sequence
  Bisulfite Padlock Probe
  misc_feature 94, 95, 96, 97, 98, 99: n = A,T,C or G
gactggaagagcactgttcacacccacgaacaaaacctataaaccgttggaggctcatcgttcctattcaggcagatgttatcgaggtccgacnnnnnnaaataaaaatcaaacacctacaaaccagatcggatacgcatgaggct

SEQ ID NO: 4068 - DNA, 146 bp, Artificial Sequence
  Bisulfite Padlock Probe
  misc_feature 94, 95, 96, 97, 98, 99: n = A,T,C or G
gactggaagagcactgttcacacccacgaacgaaacctataaaccgttggaggctcatcgttcctattcaggcagatgttatcgaggtccgacnnnnnnaaataaaaatcaaacgcctacaaaccagatcggatacgcatgaggct

SEQ ID NO: 4069 - DNA, 146 bp, Artificial Sequence
  Bisulfite Padlock Probe
  misc_feature 94, 95, 96, 97, 98, 99: n = A,T,C or G
gactggaagagcactgttcacaccgaactaaaacatctctaaaaagttggaggctcatcgttcctattcaggcagatgttatcgaggtccgacnnnnnnccaaacctacatacataaacacaaaacgatcggatacgcatgaggct

SEQ ID NO: 4070 - DNA, 146 bp, Artificial Sequence
  Bisulfite Padlock Probe
  misc_feature 94, 95, 96, 97, 98, 99: n = A,T,C or G
gactggaagagcactgttcacaccgaactaaaacgtctctaaaaagttggaggctcatcgttcctattcaggcagatgttatcgaggtccgacnnnnnnccaaacctacatacataaacgcaaaacgatcggatacgcatgaggct

SEQ ID NO: 4071 - DNA, 146 bp, Artificial Sequence
  Bisulfite Padlock Probe
  misc_feature 92, 93, 94, 95, 96, 97: n = A,T,C or G
gactggaagagcactgttcacaccgactcaaacaccttaaaaagttggaggctcatcgttcctattcaggcagatgttatcgaggtccgacnnnnnncccttatcgactacgccctcaaactataagatcggatacgcatgaggct

SEQ ID NO: 4072 - DNA, 146 bp, Artificial Sequence
  Bisulfite Padlock Probe
  misc_feature 92, 93, 94, 95, 96, 97: n = A,T,C or G
gactggaagagcactgttcacaccgactcaaacgccttaaaaagttggaggctcatcgttcctattcaggcagatgttatcgaggtccgacnnnnnncccttatcgactacgccctcgaactataagatcggatacgcatgaggct

SEQ ID NO: 4073 - DNA, 146 bp, Artificial Sequence
  Bisulfite Padlock Probe
  misc_feature 96, 97, 98, 99, 100, 101: n = A,T,C or G
gactggaagagcactgttcacacgaaaacatataattctccctaatcgttggaggctcatcgttcctattcaggcagatgttatcgaggtccgacnnnnnntaaaacgcttcttacaaacaaaaaagatcggatacgcatgaggct

SEQ ID NO: 4074 - DNA, 146 bp, Artificial Sequence
  Bisulfite Padlock Probe
  misc_feature 96, 97, 98, 99, 100, 101: n = A,T,C or G
gactggaagagcactgttcacacgaaaacgtataattctccctaatcgttggaggctcatcgttcctattcaggcagatgttatcgaggtccgacnnnnnntaaaacgcttcttacaaacgaaaaagatcggatacgcatgaggct

SEQ ID NO: 4075 - DNA, 146 bp, Artificial Sequence
  Bisulfite Padlock Probe
  misc_feature 96, 97, 98, 99, 100, 101: n = A,T,C or G
gactggaagagcactgttcacactataaacgtcgaaatcaataatctgttggaggctcatcgttcctattcaggcagatgttatcgaggtccgacnnnnnnaaaaacaaatcgcgaaacgcaaaacgatcggatacgcatgaggct

SEQ ID NO: 4076 - DNA, 146 bp, Artificial Sequence
  Bisulfite Padlock Probe
  misc_feature 96, 97, 98, 99, 100, 101: n = A,T,C or G
gactggaagagcactgttcacactataaacgtcgaaatcgataatctgttggaggctcatcgttcctattcaggcagatgttatcgaggtccgacnnnnnnaaaaacaaatcgcgaaacgcgaaacgatcggatacgcatgaggct

SEQ ID NO: 4077 - DNA, 146 bp, Artificial Sequence
  Bisulfite Padlock Probe
  misc_feature 92, 93, 94, 95, 96, 97: n = A,T,C or G
gactggaagagcactgttcacataatcccaatctaaataaaaagttggaggctcatcgttcctattcaggcagatgttatcgaggtccgacnnnnnnacaacaaaataacctacctattcaataatgatcggatacgcatgaggct

SEQ ID NO: 4078 - DNA, 146 bp, Artificial Sequence
  Bisulfite Padlock Probe
  misc_feature 96, 97, 98, 99, 100, 101: n = A,T,C or G
gactggaagagcactgttcaccaaaaacctccttaaacctcttatccgttggaggctcatcgttcctattcaggcagatgttatcgaggtccgacnnnnnnacgaccttaaataaaccataatctcgatcggatacgcatgaggct

SEQ ID NO: 4079 - DNA, 146 bp, Artificial Sequence
  Bisulfite Padlock Probe
  misc_feature 96, 97, 98, 99, 100, 101: n = A,T,C or G
gactggaagagcactgttcaccaaaaacctccttaaacctcttatccgttggaggctcatcgttcctattcaggcagatgttatcgaggtccgacnnnnnnacgaccttaaataaaccgtaatctcgatcggatacgcatgaggct

SEQ ID NO: 4080 - DNA, 146 bp, Artificial Sequence
  Bisulfite Padlock Probe
  misc_feature 94, 95, 96, 97, 98, 99: n = A,T,C or G
gactggaagagcactgttcaccaaaacaaaataactcctaaaaccgttggaggctcatcgttcctattcaggcagatgttatcgaggtccgacnnnnnnaaaaatactcttatcccaaaataaaaagatcggatacgcatgaggct

SEQ ID NO: 4081 - DNA, 146 bp, Artificial Sequence
  Bisulfite Padlock Probe
  misc_feature 94, 95, 96, 97, 98, 99: n = A,T,C or G
gactggaagagcactgttcaccaaaacgaaataactcctaaaaccgttggaggctcatcgttcctattcaggcagatgttatcgaggtccgacnnnnnnaaaaatactcttatcccgaaataaaaagatcggatacgcatgaggct

SEQ ID NO: 4082 - DNA, 146 bp, Artificial Sequence
  Bisulfite Padlock Probe
  misc_feature 93, 94, 95, 96, 97, 98: n = A,T,C or G
gactggaagagcactgttcaccaaacctccttccccaaaaattcgttggaggctcatcgttcctattcaggcagatgttatcgaggtccgacnnnnnnaactaaaaccctaaaccttaccaatcccgatcggatacgcatgaggct

SEQ ID NO: 4083 - DNA, 146 bp, Artificial Sequence
  Bisulfite Padlock Probe
  misc_feature 96, 97, 98, 99, 100, 101: n = A,T,C or G
gactggaagagcactgttcaccaacgaaacgacacaaaaccaaaaacgttggaggctcatcgttcctattcaggcagatgttatcgaggtccgacnnnnnnccccacctatccacttctccaaaaagatcggatacgcatgaggct

SEQ ID NO: 4084 - DNA, 146 bp, Artificial Sequence
  Bisulfite Padlock Probe
  misc_feature 96, 97, 98, 99, 100, 101: n = A,T,C or G
gactggaagagcactgttcaccaacgaaacgacgcaaaaccaaaaacgttggaggctcatcgttcctattcaggcagatgttatcgaggtccgacnnnnnnccccacctatccgcttctccaaaaagatcggatacgcatgaggct

SEQ ID NO: 4085 - DNA, 146 bp, Artificial Sequence
  Bisulfite Padlock Probe
  misc_feature 96, 97, 98, 99, 100, 101: n = A,T,C or G
gactggaagagcactgttcaccacaccccaaacttaaccttaacaaagttggaggctcatcgttcctattcaggcagatgttatcgaggtccgacnnnnnncacacaactaccacctccccacaccgatcggatacgcatgaggct

SEQ ID NO: 4086 - DNA, 146 bp, Artificial Sequence
  Bisulfite Padlock Probe
  misc_feature 92, 93, 94, 95, 96, 97: n = A,T,C or G
gactggaagagcactgttcaccaccttctcaactaaaccaactgttggaggctcatcgttcctattcaggcagatgttatcgaggtccgacnnnnnncaacaaacacttactccttataacatattgatcggatacgcatgaggct

SEQ ID NO: 4087 - DNA, 146 bp, Artificial Sequence
  Bisulfite Padlock Probe
  misc_feature 93, 94, 95, 96, 97, 98: n = A,T,C or G
gactggaagagcactgttcaccatattaacttcaaaaaccatatgttggaggctcatcgttcctattcaggcagatgttatcgaggtccgacnnnnnnaacaaacgaaaaaccgacacctaaaaacgatcggatacgcatgaggct

SEQ ID NO: 4088 - DNA, 146 bp, Artificial Sequence
  Bisulfite Padlock Probe
  misc_feature 93, 94, 95, 96, 97, 98: n = A,T,C or G
gactggaagagcactgttcaccatattaacttcgaaaaccatatgttggaggctcatcgttcctattcaggcagatgttatcgaggtccgacnnnnnnaacaaacgaaaaaccgacgcctaaaaacgatcggatacgcatgaggct

SEQ ID NO: 4089 - DNA, 146 bp, Artificial Sequence
  Bisulfite Padlock Probe
  misc_feature 93, 94, 95, 96, 97, 98: n = A,T,C or G
gactggaagagcactgttcaccatccaaccacaacaaccaacacgttggaggctcatcgttcctattcaggcagatgttatcgaggtccgacnnnnnnccaaaccaaaacgcgaaatactctcaaagatcggatacgcatgaggct

SEQ ID NO: 4090 - DNA, 146 bp, Artificial Sequence
  Bisulfite Padlock Probe
  misc_feature 93, 94, 95, 96, 97, 98: n = A,T,C or G
gactggaagagcactgttcaccatccaaccacaacaaccaacgcgttggaggctcatcgttcctattcaggcagatgttatcgaggtccgacnnnnnnccaaaccaaaacgcgaaatactctcgaagatcggatacgcatgaggct

SEQ ID NO: 4091 - DNA, 146 bp, Artificial Sequence
  Bisulfite Padlock Probe
  misc_feature 95, 96, 97, 98, 99, 100: n = A,T,C or G
gactggaagagcactgttcaccatcccctaaaatccataccaaaccgttggaggctcatcgttcctattcaggcagatgttatcgaggtccgacnnnnnnaaaacgtccgaaccctaacatcactagatcggatacgcatgaggct

SEQ ID NO: 4092 - DNA, 146 bp, Artificial Sequence
  Bisulfite Padlock Probe
  misc_feature 95, 96, 97, 98, 99, 100: n = A,T,C or G
gactggaagagcactgttcaccatcccctaaaatccataccaaaccgttggaggctcatcgttcctattcaggcagatgttatcgaggtccgacnnnnnnaaaacgtccgaaccctaacgtcactagatcggatacgcatgaggct

SEQ ID NO: 4093 - DNA, 146 bp, Artificial Sequence
  Bisulfite Padlock Probe
  misc_feature 95, 96, 97, 98, 99, 100: n = A,T,C or G
gactggaagagcactgttcacccaaacttatccttctacctcaccagttggaggctcatcgttcctattcaggcagatgttatcgaggtccgacnnnnnncaatcaaaaccgaacgcaccctaaccgatcggatacgcatgaggct

SEQ ID NO: 4094 - DNA, 146 bp, Artificial Sequence
  Bisulfite Padlock Probe
  misc_feature 92, 93, 94, 95, 96, 97: n = A,T,C or G
gactggaagagcactgttcacccaacaaccacatcttacctctgttggaggctcatcgttcctattcaggcagatgttatcgaggtccgacnnnnnnaatcgtaaatacaactccaacaaaaaaccgatcggatacgcatgaggct

SEQ ID NO: 4095 - DNA, 146 bp, Artificial Sequence
  Bisulfite Padlock Probe
  misc_feature 95, 96, 97, 98, 99, 100: n = A,T,C or G
gactggaagagcactgttcacccaacacaaaccccttcctaaaaacgttggaggctcatcgttcctattcaggcagatgttatcgaggtccgacnnnnnncgaccctactcctactaccgcaatccgatcggatacgcatgaggct

SEQ ID NO: 4096 - DNA, 146 bp, Artificial Sequence
  Bisulfite Padlock Probe
  misc_feature 96, 97, 98, 99, 100, 101: n = A,T,C or G
gactggaagagcactgttcacccaacacaactaaaaactaatcaaaagttggaggctcatcgttcctattcaggcagatgttatcgaggtccgacnnnnnncaaaacacaaccttacacaacccttgatcggatacgcatgaggct

SEQ ID NO: 4097 - DNA, 146 bp, Artificial Sequence
  Bisulfite Padlock Probe
  misc_feature 96, 97, 98, 99, 100, 101: n = A,T,C or G
gactggaagagcactgttcacccaacacaactaaaaactaatcgaaagttggaggctcatcgttcctattcaggcagatgttatcgaggtccgacnnnnnncaaaacacaaccttacgcaacccttgatcggatacgcatgaggct

SEQ ID NO: 4098 - DNA, 146 bp, Artificial Sequence
  Bisulfite Padlock Probe
  misc_feature 95, 96, 97, 98, 99, 100: n = A,T,C or G
gactggaagagcactgttcacccaacgcaaaccccttcctaaaaacgttggaggctcatcgttcctattcaggcagatgttatcgaggtccgacnnnnnncgaccctactcctactaccgcgatccgatcggatacgcatgaggct

SEQ ID NO: 4099 - DNA, 146 bp, Artificial Sequence
  Bisulfite Padlock Probe
  misc_feature 92, 93, 94, 95, 96, 97: n = A,T,C or G
gactggaagagcactgttcacccaatcactcaatctttaacccgttggaggctcatcgttcctattcaggcagatgttatcgaggtccgacnnnnnnaatacctaaccgaaaacaaaaacaaaatcgatcggatacgcatgaggct

SEQ ID NO: 4100 - DNA, 146 bp, Artificial Sequence
  Bisulfite Padlock Probe
  misc_feature 94, 95, 96, 97, 98, 99: n = A,T,C or G
gactggaagagcactgttcacccacaaactatacactcctaaaaagttggaggctcatcgttcctattcaggcagatgttatcgaggtccgacnnnnnnactaaaataaaaacccaaacctacttagatcggatacgcatgaggct

SEQ ID NO: 4101 - DNA, 146 bp, Artificial Sequence
  Bisulfite Padlock Probe
  misc_feature 93, 94, 95, 96, 97, 98: n = A,T,C or G
gactggaagagcactgttcacccaccgcaaactcccaactaaatgttggaggctcatcgttcctattcaggcagatgttatcgaggtccgacnnnnnncctaatctccacaaaacctctacccctcgatcggatacgcatgaggct

SEQ ID NO: 4102 - DNA, 146 bp, Artificial Sequence
  Bisulfite Padlock Probe
  misc_feature 93, 94, 95, 96, 97, 98: n = A,T,C or G
gactggaagagcactgttcacccaccgcaaactcccgactaaatgttggaggctcatcgttcctattcaggcagatgttatcgaggtccgacnnnnnncctaatctccgcaaaacctctacccctcgatcggatacgcatgaggct

SEQ ID NO: 4103 - DNA, 146 bp, Artificial Sequence
  Bisulfite Padlock Probe
  misc_feature 93, 94, 95, 96, 97, 98: n = A,T,C or G
gactggaagagcactgttcacccactacctctaactcacaaaaagttggaggctcatcgttcctattcaggcagatgttatcgaggtccgacnnnnnnctcctcacccgtactacatacaaccctcgatcggatacgcatgaggct

SEQ ID NO: 4104 - DNA, 146 bp, Artificial Sequence
  Bisulfite Padlock Probe
  misc_feature 93, 94, 95, 96, 97, 98: n = A,T,C or G
gactggaagagcactgttcacccactacctctaactcacaaaaagttggaggctcatcgttcctattcaggcagatgttatcgaggtccgacnnnnnnctcctcacccgtactacgtacaaccctcgatcggatacgcatgaggct

SEQ ID NO: 4105 - DNA, 146 bp, Artificial Sequence
  Bisulfite Padlock Probe
  misc_feature 93, 94, 95, 96, 97, 98: n = A,T,C or G
gactggaagagcactgttcaccccaaccaaccccaaatccaaaagttggaggctcatcgttcctattcaggcagatgttatcgaggtccgacnnnnnnacaaataacacaccttatcctaaaacacgatcggatacgcatgaggct

SEQ ID NO: 4106 - DNA, 146 bp, Artificial Sequence
  Bisulfite Padlock Probe
  misc_feature 93, 94, 95, 96, 97, 98: n = A,T,C or G
gactggaagagcactgttcaccccaaccaaccccaaatccaaaagttggaggctcatcgttcctattcaggcagatgttatcgaggtccgacnnnnnnacgaataacacaccttatcctaaaacacgatcggatacgcatgaggct

SEQ ID NO: 4107 - DNA, 146 bp, Artificial Sequence
  Bisulfite Padlock Probe
  misc_feature 93, 94, 95, 96, 97, 98: n = A,T,C or G
gactggaagagcactgttcaccccacctccctaaccaaaaattcgttggaggctcatcgttcctattcaggcagatgttatcgaggtccgacnnnnnnaaaaaccataacgaaactaacaaaacaagatcggatacgcatgaggct

SEQ ID NO: 4108 - DNA, 146 bp, Artificial Sequence
  Bisulfite Padlock Probe
  misc_feature 96, 97, 98, 99, 100, 101: n = A,T,C or G
gactggaagagcactgttcaccccattatacccctacaaatacccaagttggaggctcatcgttcctattcaggcagatgttatcgaggtccgacnnnnnntttttcctacaaactctaaactcccgatcggatacgcatgaggct

SEQ ID NO: 4109 - DNA, 146 bp, Artificial Sequence
  Bisulfite Padlock Probe
  misc_feature 96, 97, 98, 99, 100, 101: n = A,T,C or G
gactggaagagcactgttcaccccattatacccctacgaatacccaagttggaggctcatcgttcctattcaggcagatgttatcgaggtccgacnnnnnntttttcctacgaactctaaactcccgatcggatacgcatgaggct

SEQ ID NO: 4110 - DNA, 146 bp, Artificial Sequence
  Bisulfite Padlock Probe
  misc_feature 92, 93, 94, 95, 96, 97: n = A,T,C or G
gactggaagagcactgttcaccccattctaacccctaaatactgttggaggctcatcgttcctattcaggcagatgttatcgaggtccgacnnnnnnaaccaaaaacctcgcaaactcctaaaactgatcggatacgcatgaggct

SEQ ID NO: 4111 - DNA, 146 bp, Artificial Sequence
  Bisulfite Padlock Probe
  misc_feature 92, 93, 94, 95, 96, 97: n = A,T,C or G
gactggaagagcactgttcacccccgaaaaccaaaaccttaccgttggaggctcatcgttcctattcaggcagatgttatcgaggtccgacnnnnnntcgaatttcaaatacctaaaatacaaaaagatcggatacgcatgaggct

SEQ ID NO: 4112 - DNA, 146 bp, Artificial Sequence
  Bisulfite Padlock Probe
  misc_feature 92, 93, 94, 95, 96, 97: n = A,T,C or G
gactggaagagcactgttcacccccgaaaaccgaaaccttaccgttggaggctcatcgttcctattcaggcagatgttatcgaggtccgacnnnnnntcgaatttcaaatacctaaaatacgaaaagatcggatacgcatgaggct

SEQ ID NO: 4113 - DNA, 146 bp, Artificial Sequence
  Bisulfite Padlock Probe
  misc_feature 92, 93, 94, 95, 96, 97: n = A,T,C or G
gactggaagagcactgttcacccctacaaaccccaactccaacgttggaggctcatcgttcctattcaggcagatgttatcgaggtccgacnnnnnnaaatcaaacaactcccaccactaattctcgatcggatacgcatgaggct

SEQ ID NO: 4114 - DNA, 146 bp, Artificial Sequence
  Bisulfite Padlock Probe
  misc_feature 92, 93, 94, 95, 96, 97: n = A,T,C or G
gactggaagagcactgttcacccctacaaaccccgactccaacgttggaggctcatcgttcctattcaggcagatgttatcgaggtccgacnnnnnnaaatcgaacaactcccaccactaattctcgatcggatacgcatgaggct

SEQ ID NO: 4115 - DNA, 146 bp, Artificial Sequence
  Bisulfite Padlock Probe
  misc_feature 95, 96, 97, 98, 99, 100: n = A,T,C or G
gactggaagagcactgttcacccgaacttatccttctacctcaccagttggaggctcatcgttcctattcaggcagatgttatcgaggtccgacnnnnnncaatcaaaaccgaacgcgccctaaccgatcggatacgcatgaggct

SEQ ID NO: 4116 - DNA, 146 bp, Artificial Sequence
  Bisulfite Padlock Probe
  misc_feature 92, 93, 94, 95, 96, 97: n = A,T,C or G
gactggaagagcactgttcacccgatcactcaatctttaacccgttggaggctcatcgttcctattcaggcagatgttatcgaggtccgacnnnnnnaatacctaaccgaaaacgaaaacaaaatcgatcggatacgcatgaggct

SEQ ID NO: 4117 - DNA, 146 bp, Artificial Sequence
  Bisulfite Padlock Probe
  misc_feature 94, 95, 96, 97, 98, 99: n = A,T,C or G
gactggaagagcactgttcacccgcaaactatacactcctaaaaagttggaggctcatcgttcctattcaggcagatgttatcgaggtccgacnnnnnnactaaaataaaaacccaaacctacttagatcggatacgcatgaggct

SEQ ID NO: 4118 - DNA, 146 bp, Artificial Sequence
  Bisulfite Padlock Probe
  misc_feature 92, 93, 94, 95, 96, 97: n = A,T,C or G
gactggaagagcactgttcaccctacctctaaaatcacaccacgttggaggctcatcgttcctattcaggcagatgttatcgaggtccgacnnnnnnctacaaccaacaacaacacctcttctaccgatcggatacgcatgaggct

SEQ ID NO: 4119 - DNA, 146 bp, Artificial Sequence
  Bisulfite Padlock Probe
  misc_feature 92, 93, 94, 95, 96, 97: n = A,T,C or G
gactggaagagcactgttcaccctacctctaaaatcacaccacgttggaggctcatcgttcctattcaggcagatgttatcgaggtccgacnnnnnnctacaaccaacaacgacacctcttctaccgatcggatacgcatgaggct

SEQ ID NO: 4120 - DNA, 146 bp, Artificial Sequence
  Bisulfite Padlock Probe
  misc_feature 96, 97, 98, 99, 100, 101: n = A,T,C or G
gactggaagagcactgttcaccctccccaacacaccataaaataaatgttggaggctcatcgttcctattcaggcagatgttatcgaggtccgacnnnnnnaatcaaaaccatacccctaaactccgatcggatacgcatgaggct

SEQ ID NO: 4121 - DNA, 146 bp, Artificial Sequence
  Bisulfite Padlock Probe
  misc_feature 94, 95, 96, 97, 98, 99: n = A,T,C or G
gactggaagagcactgttcaccctccctacaaaaccccaaaacaagttggaggctcatcgttcctattcaggcagatgttatcgaggtccgacnnnnnnaaaaattaaacgacgacaaaaaatcccgatcggatacgcatgaggct

SEQ ID NO: 4122 - DNA, 146 bp, Artificial Sequence
  Bisulfite Padlock Probe
  misc_feature 94, 95, 96, 97, 98, 99: n = A,T,C or G
gactggaagagcactgttcaccctccctacaaaaccccaaaacaagttggaggctcatcgttcctattcaggcagatgttatcgaggtccgacnnnnnnaaaaattaaacgacgacgaaaaatcccgatcggatacgcatgaggct

SEQ ID NO: 4123 - DNA, 146 bp, Artificial Sequence
  Bisulfite Padlock Probe
  misc_feature 92, 93, 94, 95, 96, 97: n = A,T,C or G
gactggaagagcactgttcaccctctactcacccctactactagttggaggctcatcgttcctattcaggcagatgttatcgaggtccgacnnnnnnataatatccctaaacacctccaaccaatagatcggatacgcatgaggct

SEQ ID NO: 4124 - DNA, 146 bp, Artificial Sequence
  Bisulfite Padlock Probe
  misc_feature 95, 96, 97, 98, 99, 100: n = A,T,C or G
gactggaagagcactgttcacccttaaatttaaaaattaatcattcgttggaggctcatcgttcctattcaggcagatgttatcgaggtccgacnnnnnnaaactttaataaccactaaaaatttagatcggatacgcatgaggct

SEQ ID NO: 4125 - DNA, 146 bp, Artificial Sequence
  Bisulfite Padlock Probe
  misc_feature 95, 96, 97, 98, 99, 100: n = A,T,C or G
gactggaagagcactgttcacccttaaatttaaaaattaatcattcgttggaggctcatcgttcctattcaggcagatgttatcgaggtccgacnnnnnnaaactttaataaccgctaaaaatttagatcggatacgcatgaggct

SEQ ID NO: 4126 - DNA, 146 bp, Artificial Sequence
  Bisulfite Padlock Probe
  misc_feature 94, 95, 96, 97, 98, 99: n = A,T,C or G
gactggaagagcactgttcaccgaaacccgaactcttacatttccgttggaggctcatcgttcctattcaggcagatgttatcgaggtccgacnnnnnnaaaacacacaatctaaaaacccaaaaagatcggatacgcatgaggct

SEQ ID NO: 4127 - DNA, 146 bp, Artificial Sequence
  Bisulfite Padlock Probe
  misc_feature 94, 95, 96, 97, 98, 99: n = A,T,C or G
gactggaagagcactgttcaccgaaacccgaactcttacgtttccgttggaggctcatcgttcctattcaggcagatgttatcgaggtccgacnnnnnnaaaacgcacaatctaaaaacccaaaaagatcggatacgcatgaggct

SEQ ID NO: 4128 - DNA, 146 bp, Artificial Sequence
  Bisulfite Padlock Probe
  misc_feature 92, 93, 94, 95, 96, 97: n = A,T,C or G
gactggaagagcactgttcaccgaatacacatatttcacacacgttggaggctcatcgttcctattcaggcagatgttatcgaggtccgacnnnnnnaaaactttccaattaaaaactacacacctgatcggatacgcatgaggct

SEQ ID NO: 4129 - DNA, 146 bp, Artificial Sequence
  Bisulfite Padlock Probe
  misc_feature 92, 93, 94, 95, 96, 97: n = A,T,C or G
gactggaagagcactgttcaccgaatacacgtatttcacacacgttggaggctcatcgttcctattcaggcagatgttatcgaggtccgacnnnnnnaaaactttccaattaaaaactacacacctgatcggatacgcatgaggct

SEQ ID NO: 4130 - DNA, 146 bp, Artificial Sequence
  Bisulfite Padlock Probe
  misc_feature 94, 95, 96, 97, 98, 99: n = A,T,C or G
gactggaagagcactgttcaccgaatctccgaacgctaaaaacacgttggaggctcatcgttcctattcaggcagatgttatcgaggtccgacnnnnnnaccgcttacccaaactaaacttataccgatcggatacgcatgaggct

SEQ ID NO: 4131 - DNA, 146 bp, Artificial Sequence
  Bisulfite Padlock Probe
  misc_feature 94, 95, 96, 97, 98, 99: n = A,T,C or G
gactggaagagcactgttcaccgaatctccgaacgctaaaaacgcgttggaggctcatcgttcctattcaggcagatgttatcgaggtccgacnnnnnnaccgcttacccgaactaaacttataccgatcggatacgcatgaggct

SEQ ID NO: 4132 - DNA, 146 bp, Artificial Sequence
  Bisulfite Padlock Probe
  misc_feature 96, 97, 98, 99, 100, 101: n = A,T,C or G
gactggaagagcactgttcaccgcaccccaaacttaaccttaacaaagttggaggctcatcgttcctattcaggcagatgttatcgaggtccgacnnnnnncacacaactaccacctccccacaccgatcggatacgcatgaggct

SEQ ID NO: 4133 - DNA, 146 bp, Artificial Sequence
  Bisulfite Padlock Probe
  misc_feature 92, 93, 94, 95, 96, 97: n = A,T,C or G
gactggaagagcactgttcaccgccttctcaactaaaccaactgttggaggctcatcgttcctattcaggcagatgttatcgaggtccgacnnnnnncaacaaacacttactccttataacatattgatcggatacgcatgaggct

SEQ ID NO: 4134 - DNA, 146 bp, Artificial Sequence
  Bisulfite Padlock Probe
  misc_feature 95, 96, 97, 98, 99, 100: n = A,T,C or G
gactggaagagcactgttcaccgcgaacttaaacaaccttcaaaaagttggaggctcatcgttcctattcaggcagatgttatcgaggtccgacnnnnnnaaacaaacgataaacgatcgcatttcgatcggatacgcatgaggct

SEQ ID NO: 4135 - DNA, 146 bp, Artificial Sequence
  Bisulfite Padlock Probe
  misc_feature 95, 96, 97, 98, 99, 100: n = A,T,C or G
gactggaagagcactgttcaccgcgaacttaaacgaccttcaaaaagttggaggctcatcgttcctattcaggcagatgttatcgaggtccgacnnnnnnaaacaaacgataaacgatcgcgtttcgatcggatacgcatgaggct

SEQ ID NO: 4136 - DNA, 146 bp, Artificial Sequence
  Bisulfite Padlock Probe
  misc_feature 95, 96, 97, 98, 99, 100: n = A,T,C or G
gactggaagagcactgttcacctaaaaacgcacctacactaacacagttggaggctcatcgttcctattcaggcagatgttatcgaggtccgacnnnnnnccataatatcgaacgccgcaactaccgatcggatacgcatgaggct

SEQ ID NO: 4137 - DNA, 146 bp, Artificial Sequence
  Bisulfite Padlock Probe
  misc_feature 95, 96, 97, 98, 99, 100: n = A,T,C or G
gactggaagagcactgttcacctaaaaacgcacctacgctaacacagttggaggctcatcgttcctattcaggcagatgttatcgaggtccgacnnnnnnccataatatcgaacgccgcgactaccgatcggatacgcatgaggct

SEQ ID NO: 4138 - DNA, 146 bp, Artificial Sequence
  Bisulfite Padlock Probe
  misc_feature 95, 96, 97, 98, 99, 100: n = A,T,C or G
gactggaagagcactgttcacctaaaaataaacgccttcaaacaacgttggaggctcatcgttcctattcaggcagatgttatcgaggtccgacnnnnnnaaaacctaaacttcccctccttcctcgatcggatacgcatgaggct

SEQ ID NO: 4139 - DNA, 146 bp, Artificial Sequence
  Bisulfite Padlock Probe
  misc_feature 95, 96, 97, 98, 99, 100: n = A,T,C or G
gactggaagagcactgttcacctaaaaataaacgccttcaaacgacgttggaggctcatcgttcctattcaggcagatgttatcgaggtccgacnnnnnnaaaacctaaacttcccctccttcctcgatcggatacgcatgaggct

SEQ ID NO: 4140 - DNA, 146 bp, Artificial Sequence
  Bisulfite Padlock Probe
  misc_feature 95, 96, 97, 98, 99, 100: n = A,T,C or G
gactggaagagcactgttcacctaaaacgcctatcgcacctctaaagttggaggctcatcgttcctattcaggcagatgttatcgaggtccgacnnnnnntccaaataccgactctcaacttaaaagatcggatacgcatgaggct

SEQ ID NO: 4141 - DNA, 146 bp, Artificial Sequence
  Bisulfite Padlock Probe
  misc_feature 95, 96, 97, 98, 99, 100: n = A,T,C or G
gactggaagagcactgttcacctaaaacgcctatcgcgcctctaaagttggaggctcatcgttcctattcaggcagatgttatcgaggtccgacnnnnnntccaaataccgactctcgacttaaaagatcggatacgcatgaggct

SEQ ID NO: 4142 - DNA, 146 bp, Artificial Sequence
  Bisulfite Padlock Probe
  misc_feature 95, 96, 97, 98, 99, 100: n = A,T,C or G
gactggaagagcactgttcacctacaacctcgataaccccaacatagttggaggctcatcgttcctattcaggcagatgttatcgaggtccgacnnnnnnactctaccgccaaaccctaaaacttcgatcggatacgcatgaggct

SEQ ID NO: 4143 - DNA, 146 bp, Artificial Sequence
  Bisulfite Padlock Probe
  misc_feature 95, 96, 97, 98, 99, 100: n = A,T,C or G
gactggaagagcactgttcacctacaacctcgataaccccgacatagttggaggctcatcgttcctattcaggcagatgttatcgaggtccgacnnnnnnactctaccgccgaaccctaaaacttcgatcggatacgcatgaggct

SEQ ID NO: 4144 - DNA, 146 bp, Artificial Sequence
  Bisulfite Padlock Probe
  misc_feature 93, 94, 95, 96, 97, 98: n = A,T,C or G
gactggaagagcactgttcacctacacctactcatctacatccagttggaggctcatcgttcctattcaggcagatgttatcgaggtccgacnnnnnnctaaacttaaccaacaaccaatacaaaagatcggatacgcatgaggct

SEQ ID NO: 4145 - DNA, 146 bp, Artificial Sequence
  Bisulfite Padlock Probe
  misc_feature 96, 97, 98, 99, 100, 101: n = A,T,C or G
gactggaagagcactgttcacctaccaattcgactccttcctcaaatgttggaggctcatcgttcctattcaggcagatgttatcgaggtccgacnnnnnnaaaaattcttcgactacttctccacgatcggatacgcatgaggct

SEQ ID NO: 4146 - DNA, 146 bp, Artificial Sequence
  Bisulfite Padlock Probe
  misc_feature 96, 97, 98, 99, 100, 101: n = A,T,C or G
gactggaagagcactgttcacctaccaattcgactccttcctcgaatgttggaggctcatcgttcctattcaggcagatgttatcgaggtccgacnnnnnnaaaaattcttcgactacttctccgcgatcggatacgcatgaggct

SEQ ID NO: 4147 - DNA, 146 bp, Artificial Sequence
  Bisulfite Padlock Probe
  misc_feature 92, 93, 94, 95, 96, 97: n = A,T,C or G
gactggaagagcactgttcacctacccgacttacatacacaacgttggaggctcatcgttcctattcaggcagatgttatcgaggtccgacnnnnnnaacctcacactcaacaactacttcctcaagatcggatacgcatgaggct

SEQ ID NO: 4148 - DNA, 146 bp, Artificial Sequence
  Bisulfite Padlock Probe
  misc_feature 92, 93, 94, 95, 96, 97: n = A,T,C or G
gactggaagagcactgttcacctacccgacttacatacacgacgttggaggctcatcgttcctattcaggcagatgttatcgaggtccgacnnnnnnaacctcacactcaacgactacttcctcaagatcggatacgcatgaggct

SEQ ID NO: 4149 - DNA, 146 bp, Artificial Sequence
  Bisulfite Padlock Probe
  misc_feature 93, 94, 95, 96, 97, 98: n = A,T,C or G
gactggaagagcactgttcacctacgcctactcatctacatccagttggaggctcatcgttcctattcaggcagatgttatcgaggtccgacnnnnnnctaaacttaaccaacgaccaatacaaaagatcggatacgcatgaggct

SEQ ID NO: 4150 - DNA, 146 bp, Artificial Sequence
  Bisulfite Padlock Probe
  misc_feature 96, 97, 98, 99, 100, 101: n = A,T,C or G
gactggaagagcactgttcacctcaatttccccataaaccaaaccaagttggaggctcatcgttcctattcaggcagatgttatcgaggtccgacnnnnnncaaccccaaaacaaccttcaccaccgatcggatacgcatgaggct

SEQ ID NO: 4151 - DNA, 146 bp, Artificial Sequence
  Bisulfite Padlock Probe
  misc_feature 96, 97, 98, 99, 100, 101: n = A,T,C or G
gactggaagagcactgttcacctcaatttccccataaaccaaaccaagttggaggctcatcgttcctattcaggcagatgttatcgaggtccgacnnnnnncaaccccaaaacaaccttcaccgccgatcggatacgcatgaggct

SEQ ID NO: 4152 - DNA, 146 bp, Artificial Sequence
  Bisulfite Padlock Probe
  misc_feature 95, 96, 97, 98, 99, 100: n = A,T,C or G
gactggaagagcactgttcacctcataaaaacttttatcctcctttgttggaggctcatcgttcctattcaggcagatgttatcgaggtccgacnnnnnncctccaactacgaaaaatatacaaaagatcggatacgcatgaggct

SEQ ID NO: 4153 - DNA, 146 bp, Artificial Sequence
  Bisulfite Padlock Probe
  misc_feature 93, 94, 95, 96, 97, 98: n = A,T,C or G
gactggaagagcactgttcacctccaaaaatatcaaaaacaactgttggaggctcatcgttcctattcaggcagatgttatcgaggtccgacnnnnnnaaaaactcgaccgaacccattaaacaacgatcggatacgcatgaggct

SEQ ID NO: 4154 - DNA, 146 bp, Artificial Sequence
  Bisulfite Padlock Probe
  misc_feature 93, 94, 95, 96, 97, 98: n = A,T,C or G
gactggaagagcactgttcacctccaaaaatatcaaaaacgactgttggaggctcatcgttcctattcaggcagatgttatcgaggtccgacnnnnnnaaaaactcgaccgaacccgttaaacaacgatcggatacgcatgaggct

SEQ ID NO: 4155 - DNA, 146 bp, Artificial Sequence
  Bisulfite Padlock Probe
  misc_feature 96, 97, 98, 99, 100, 101: n = A,T,C or G
gactggaagagcactgttcacctccttaataccaaccatcttttcccgttggaggctcatcgttcctattcaggcagatgttatcgaggtccgacnnnnnntacgcacctacccaactcacctaccgatcggatacgcatgaggct

SEQ ID NO: 4156 - DNA, 146 bp, Artificial Sequence
  Bisulfite Padlock Probe
  misc_feature 96, 97, 98, 99, 100, 101: n = A,T,C or G
gactggaagagcactgttcacctccttaataccaaccatcttttcccgttggaggctcatcgttcctattcaggcagatgttatcgaggtccgacnnnnnntacgcacctacccgactcacctaccgatcggatacgcatgaggct

SEQ ID NO: 4157 - DNA, 146 bp, Artificial Sequence
  Bisulfite Padlock Probe
  misc_feature 95, 96, 97, 98, 99, 100: n = A,T,C or G
gactggaagagcactgttcacctcgtaaaaacttttatcctcctttgttggaggctcatcgttcctattcaggcagatgttatcgaggtccgacnnnnnncctccaactacgaaaaatatacgaaagatcggatacgcatgaggct

SEQ ID NO: 4158 - DNA, 146 bp, Artificial Sequence
  Bisulfite Padlock Probe
  misc_feature 96, 97, 98, 99, 100, 101: n = A,T,C or G
gactggaagagcactgttcacctctaccaaacaaaccataaaacaccgttggaggctcatcgttcctattcaggcagatgttatcgaggtccgacnnnnnncactccccgtacccatctacatattgatcggatacgcatgaggct

SEQ ID NO: 4159 - DNA, 146 bp, Artificial Sequence
  Bisulfite Padlock Probe
  misc_feature 96, 97, 98, 99, 100, 101: n = A,T,C or G
gactggaagagcactgttcacctctaccaaacaaaccataaaacaccgttggaggctcatcgttcctattcaggcagatgttatcgaggtccgacnnnnnncactccccgtacccgtctacatattgatcggatacgcatgaggct

SEQ ID NO: 4160 - DNA, 146 bp, Artificial Sequence
  Bisulfite Padlock Probe
  misc_feature 95, 96, 97, 98, 99, 100: n = A,T,C or G
gactggaagagcactgttcaccttaaccttacacacaatcctttaagttggaggctcatcgttcctattcaggcagatgttatcgaggtccgacnnnnnnaacccccactccccaatctcaaaaaagatcggatacgcatgaggct

SEQ ID NO: 4161 - DNA, 146 bp, Artificial Sequence
  Bisulfite Padlock Probe
  misc_feature 95, 96, 97, 98, 99, 100: n = A,T,C or G
gactggaagagcactgttcaccttaaccttacacacaatcctttaagttggaggctcatcgttcctattcaggcagatgttatcgaggtccgacnnnnnnaacccccactccccaatctcgaaaaagatcggatacgcatgaggct

SEQ ID NO: 4162 - DNA, 146 bp, Artificial Sequence
  Bisulfite Padlock Probe
  misc_feature 94, 95, 96, 97, 98, 99: n = A,T,C or G
gactggaagagcactgttcaccttccgaaaaccgaaatccaactcgttggaggctcatcgttcctattcaggcagatgttatcgaggtccgacnnnnnnaatcctcctaaacccacctcaatcctagatcggatacgcatgaggct

SEQ ID NO: 4163 - DNA, 146 bp, Artificial Sequence
  Bisulfite Padlock Probe
  misc_feature 94, 95, 96, 97, 98, 99: n = A,T,C or G
gactggaagagcactgttcaccttccgaaaaccgaaatccgactcgttggaggctcatcgttcctattcaggcagatgttatcgaggtccgacnnnnnnaatcctcctaaacccgcctcaatcctagatcggatacgcatgaggct

SEQ ID NO: 4164 - DNA, 146 bp, Artificial Sequence
  Bisulfite Padlock Probe
  misc_feature 93, 94, 95, 96, 97, 98: n = A,T,C or G
gactggaagagcactgttcacgcccaacaaaatactatcctaacgttggaggctcatcgttcctattcaggcagatgttatcgaggtccgacnnnnnnctctaattaactaaaaaccgcaaccctcgatcggatacgcatgaggct

SEQ ID NO: 4165 - DNA, 146 bp, Artificial Sequence
  Bisulfite Padlock Probe
  misc_feature 93, 94, 95, 96, 97, 98: n = A,T,C or G
gactggaagagcactgttcacgcccgacaaaatactatcctaacgttggaggctcatcgttcctattcaggcagatgttatcgaggtccgacnnnnnnctctaattaactaaaaaccgcgaccctcgatcggatacgcatgaggct

SEQ ID NO: 4166 - DNA, 146 bp, Artificial Sequence
  Bisulfite Padlock Probe
  misc_feature 95, 96, 97, 98, 99, 100: n = A,T,C or G
gactggaagagcactgttcacgcctatcatcccaacactttaaaaagttggaggctcatcgttcctattcaggcagatgttatcgaggtccgacnnnnnncaaaccctcaacccaaaaccccctaagatcggatacgcatgaggct

SEQ ID NO: 4167 - DNA, 146 bp, Artificial Sequence
  Bisulfite Padlock Probe
  misc_feature 95, 96, 97, 98, 99, 100: n = A,T,C or G
gactggaagagcactgttcacgcctatcgtcccaacactttaaaaagttggaggctcatcgttcctattcaggcagatgttatcgaggtccgacnnnnnncaaaccctcaacccgaaaccccctaagatcggatacgcatgaggct

SEQ ID NO: 4168 - DNA, 146 bp, Artificial Sequence
  Bisulfite Padlock Probe
  misc_feature 96, 97, 98, 99, 100, 101: n = A,T,C or G
gactggaagagcactgttcacgctacccaaaactctaaaaccaatatgttggaggctcatcgttcctattcaggcagatgttatcgaggtccgacnnnnnnaacctaacgaaacgcaaacctccccgatcggatacgcatgaggct

SEQ ID NO: 4169 - DNA, 146 bp, Artificial Sequence
  Bisulfite Padlock Probe
  misc_feature 96, 97, 98, 99, 100, 101: n = A,T,C or G
gactggaagagcactgttcacgctacccaaaactctaaaaccgatatgttggaggctcatcgttcctattcaggcagatgttatcgaggtccgacnnnnnnaacctaacgaaacgcgaacctccccgatcggatacgcatgaggct

SEQ ID NO: 4170 - DNA, 146 bp, Artificial Sequence
  Bisulfite Padlock Probe
  misc_feature 92, 93, 94, 95, 96, 97: n = A,T,C or G
gactggaagagcactgttcacgtaatcccaatctaaataaaaagttggaggctcatcgttcctattcaggcagatgttatcgaggtccgacnnnnnnacaacgaaataacctacctattcaataatgatcggatacgcatgaggct

SEQ ID NO: 4171 - DNA, 146 bp, Artificial Sequence
  Bisulfite Padlock Probe
  misc_feature 94, 95, 96, 97, 98, 99: n = A,T,C or G
gactggaagagcactgttcacgtacctaaactaaaaccaaaacccgttggaggctcatcgttcctattcaggcagatgttatcgaggtccgacnnnnnnaaaaaccaataaatcacacccactcacgatcggatacgcatgaggct

SEQ ID NO: 4172 - DNA, 146 bp, Artificial Sequence
  Bisulfite Padlock Probe
  misc_feature 94, 95, 96, 97, 98, 99: n = A,T,C or G
gactggaagagcactgttcacgtacctaaactaaaaccgaaacccgttggaggctcatcgttcctattcaggcagatgttatcgaggtccgacnnnnnnaaaaaccaataaatcacgcccactcacgatcggatacgcatgaggct

SEQ ID NO: 4173 - DNA, 146 bp, Artificial Sequence
  Bisulfite Padlock Probe
  misc_feature 93, 94, 95, 96, 97, 98: n = A,T,C or G
gactggaagagcactgttcacgtcgcgcaacctcaacatattacgttggaggctcatcgttcctattcaggcagatgttatcgaggtccgacnnnnnnaccgttttctaaactaaacaacgacaacgatcggatacgcatgaggct

SEQ ID NO: 4174 - DNA, 146 bp, Artificial Sequence
  Bisulfite Padlock Probe
  misc_feature 93, 94, 95, 96, 97, 98: n = A,T,C or G
gactggaagagcactgttcacgtcgcgcaacctcaacgtattacgttggaggctcatcgttcctattcaggcagatgttatcgaggtccgacnnnnnnaccgttttctaaactaaacaacgacgacgatcggatacgcatgaggct

SEQ ID NO: 4175 - DNA, 146 bp, Artificial Sequence
  Bisulfite Padlock Probe
  misc_feature 96, 97, 98, 99, 100, 101: n = A,T,C or G
gactggaagagcactgttcactaaaacaataaccgaccaaataaaaagttggaggctcatcgttcctattcaggcagatgttatcgaggtccgacnnnnnnatctccctaccgacacgaacccaaagatcggatacgcatgaggct

SEQ ID NO: 4176 - DNA, 146 bp, Artificial Sequence
  Bisulfite Padlock Probe
  misc_feature 96, 97, 98, 99, 100, 101: n = A,T,C or G
gactggaagagcactgttcactaaaacaataaccgaccgaataaaaagttggaggctcatcgttcctattcaggcagatgttatcgaggtccgacnnnnnnatctccctaccgacacgaacccgaagatcggatacgcatgaggct

SEQ ID NO: 4177 - DNA, 146 bp, Artificial Sequence
  Bisulfite Padlock Probe
  misc_feature 94, 95, 96, 97, 98, 99: n = A,T,C or G
gactggaagagcactgttcactaaaacctaaaaacccgacaaaacgttggaggctcatcgttcctattcaggcagatgttatcgaggtccgacnnnnnnaaaaacaataactcgaacctaacacccgatcggatacgcatgaggct

SEQ ID NO: 4178 - DNA, 146 bp, Artificial Sequence
  Bisulfite Padlock Probe
  misc_feature 94, 95, 96, 97, 98, 99: n = A,T,C or G
gactggaagagcactgttcactaaaacctaaaaacccgacgaaacgttggaggctcatcgttcctattcaggcagatgttatcgaggtccgacnnnnnnaaaaacaataactcgaacctaacgcccgatcggatacgcatgaggct

SEQ ID NO: 4179 - DNA, 146 bp, Artificial Sequence
  Bisulfite Padlock Probe
  misc_feature 92, 93, 94, 95, 96, 97: n = A,T,C or G
gactggaagagcactgttcactaaccttaaaccctacttactcgttggaggctcatcgttcctattcaggcagatgttatcgaggtccgacnnnnnntctaatcaaaccaaaaattactaaaaaccgatcggatacgcatgaggct

SEQ ID NO: 4180 - DNA, 146 bp, Artificial Sequence
  Bisulfite Padlock Probe
  misc_feature 96, 97, 98, 99, 100, 101: n = A,T,C or G
gactggaagagcactgttcactaactaacttctccaactcaacattcgttggaggctcatcgttcctattcaggcagatgttatcgaggtccgacnnnnnntaaactactactaaaaactacattcgatcggatacgcatgaggct

SEQ ID NO: 4181 - DNA, 146 bp, Artificial Sequence
  Bisulfite Padlock Probe
  misc_feature 96, 97, 98, 99, 100, 101: n = A,T,C or G
gactggaagagcactgttcactaactaacttctccaactcaacattcgttggaggctcatcgttcctattcaggcagatgttatcgaggtccgacnnnnnntaaactactactaaaaactacgttcgatcggatacgcatgaggct

SEQ ID NO: 4182 - DNA, 146 bp, Artificial Sequence
  Bisulfite Padlock Probe
  misc_feature 95, 96, 97, 98, 99, 100: n = A,T,C or G
gactggaagagcactgttcactaactctaaaattcgcaaaaacaccgttggaggctcatcgttcctattcaggcagatgttatcgaggtccgacnnnnnnaaaaataacaacaacaactaacgcacgatcggatacgcatgaggct

SEQ ID NO: 4183 - DNA, 146 bp, Artificial Sequence
  Bisulfite Padlock Probe
  misc_feature 95, 96, 97, 98, 99, 100: n = A,T,C or G
gactggaagagcactgttcactaactctaaaattcgcaaaaacgccgttggaggctcatcgttcctattcaggcagatgttatcgaggtccgacnnnnnnaaaaataacaacaacaactaacgcgcgatcggatacgcatgaggct

SEQ ID NO: 4184 - DNA, 146 bp, Artificial Sequence
  Bisulfite Padlock Probe
  misc_feature 96, 97, 98, 99, 100, 101: n = A,T,C or G
gactggaagagcactgttcactaataccctcccatattacaacccaagttggaggctcatcgttcctattcaggcagatgttatcgaggtccgacnnnnnnaaaaacaacacaatacccgccccacgatcggatacgcatgaggct

SEQ ID NO: 4185 - DNA, 146 bp, Artificial Sequence
  Bisulfite Padlock Probe
  misc_feature 96, 97, 98, 99, 100, 101: n = A,T,C or G
gactggaagagcactgttcactaataccctcccatattacaacccaagttggaggctcatcgttcctattcaggcagatgttatcgaggtccgacnnnnnnaaaaacaacacaatacccgccccgcgatcggatacgcatgaggct

SEQ ID NO: 4186 - DNA, 146 bp, Artificial Sequence
  Bisulfite Padlock Probe
  misc_feature 92, 93, 94, 95, 96, 97: n = A,T,C or G
gactggaagagcactgttcactacaactccgtacaacaacaacgttggaggctcatcgttcctattcaggcagatgttatcgaggtccgacnnnnnnacaacgccgtaaacaaatccaataaaaacgatcggatacgcatgaggct

SEQ ID NO: 4187 - DNA, 146 bp, Artificial Sequence
  Bisulfite Padlock Probe
  misc_feature 92, 93, 94, 95, 96, 97: n = A,T,C or G
gactggaagagcactgttcactacaactccgtacgacaacaacgttggaggctcatcgttcctattcaggcagatgttatcgaggtccgacnnnnnnacaacgccgtaaacaaatccgataaaaacgatcggatacgcatgaggct

SEQ ID NO: 4188 - DNA, 146 bp, Artificial Sequence
  Bisulfite Padlock Probe
  misc_feature 96, 97, 98, 99, 100, 101: n = A,T,C or G
gactggaagagcactgttcactactaccattcaactaccacctaactgttggaggctcatcgttcctattcaggcagatgttatcgaggtccgacnnnnnnaaaaacaaaattcaaaacctaaaaagatcggatacgcatgaggct

SEQ ID NO: 4189 - DNA, 146 bp, Artificial Sequence
  Bisulfite Padlock Probe
  misc_feature 96, 97, 98, 99, 100, 101: n = A,T,C or G
gactggaagagcactgttcactactaccattcaactaccgcctaactgttggaggctcatcgttcctattcaggcagatgttatcgaggtccgacnnnnnnaaaaacgaaattcaaaacctaaaaagatcggatacgcatgaggct

SEQ ID NO: 4190 - DNA, 146 bp, Artificial Sequence
  Bisulfite Padlock Probe
  misc_feature 93, 94, 95, 96, 97, 98: n = A,T,C or G
gactggaagagcactgttcactatacactatcctaacttaccaagttggaggctcatcgttcctattcaggcagatgttatcgaggtccgacnnnnnnccctaactaacccaaaactaacccctacgatcggatacgcatgaggct

SEQ ID NO: 4191 - DNA, 146 bp, Artificial Sequence
  Bisulfite Padlock Probe
  misc_feature 93, 94, 95, 96, 97, 98: n = A,T,C or G
gactggaagagcactgttcactatacgctatcctaacttaccaagttggaggctcatcgttcctattcaggcagatgttatcgaggtccgacnnnnnnccctaactaacccgaaactaacccctacgatcggatacgcatgaggct

SEQ ID NO: 4192 - DNA, 146 bp, Artificial Sequence
  Bisulfite Padlock Probe
  misc_feature 96, 97, 98, 99, 100, 101: n = A,T,C or G
gactggaagagcactgttcactcacacctacccctactatataccacgttggaggctcatcgttcctattcaggcagatgttatcgaggtccgacnnnnnncctcgaataacacccaacctccctcgatcggatacgcatgaggct

SEQ ID NO: 4193 - DNA, 146 bp, Artificial Sequence
  Bisulfite Padlock Probe
  misc_feature 96, 97, 98, 99, 100, 101: n = A,T,C or G
gactggaagagcactgttcactcacacctacccctactatataccacgttggaggctcatcgttcctattcaggcagatgttatcgaggtccgacnnnnnncctcgaataacgcccaacctccctcgatcggatacgcatgaggct

SEQ ID NO: 4194 - DNA, 146 bp, Artificial Sequence
  Bisulfite Padlock Probe
  misc_feature 96, 97, 98, 99, 100, 101: n = A,T,C or G
gactggaagagcactgttcactcatatttttcttttcccaacacaaagttggaggctcatcgttcctattcaggcagatgttatcgaggtccgacnnnnnnaacgcgctctaaacaaactaaaatcgatcggatacgcatgaggct

SEQ ID NO: 4195 - DNA, 146 bp, Artificial Sequence
  Bisulfite Padlock Probe
  misc_feature 96, 97, 98, 99, 100, 101: n = A,T,C or G
gactggaagagcactgttcactcatatttttcttttcccgacacaaagttggaggctcatcgttcctattcaggcagatgttatcgaggtccgacnnnnnnaacgcgctctaaacgaactaaaatcgatcggatacgcatgaggct

SEQ ID NO: 4196 - DNA, 146 bp, Artificial Sequence
  Bisulfite Padlock Probe
  misc_feature 93, 94, 95, 96, 97, 98: n = A,T,C or G
gactggaagagcactgttcactccaaccaccctaaacctcctacgttggaggctcatcgttcctattcaggcagatgttatcgaggtccgacnnnnnnaatcacctaaaaataaattcaaaaacatgatcggatacgcatgaggct

SEQ ID NO: 4197 - DNA, 146 bp, Artificial Sequence
  Bisulfite Padlock Probe
  misc_feature 94, 95, 96, 97, 98, 99: n = A,T,C or G
gactggaagagcactgttcactccgcgatcccaaaaatccaaatcgttggaggctcatcgttcctattcaggcagatgttatcgaggtccgacnnnnnnaaaccaacttcgacgaccaaaataaacgatcggatacgcatgaggct

SEQ ID NO: 4198 - DNA, 146 bp, Artificial Sequence
  Bisulfite Padlock Probe
  misc_feature 94, 95, 96, 97, 98, 99: n = A,T,C or G
gactggaagagcactgttcactccgcgatcccaaaaatccgaatcgttggaggctcatcgttcctattcaggcagatgttatcgaggtccgacnnnnnnaaaccaacttcgacgaccgaaataaacgatcggatacgcatgaggct

SEQ ID NO: 4199 - DNA, 146 bp, Artificial Sequence
  Bisulfite Padlock Probe
  misc_feature 92, 93, 94, 95, 96, 97: n = A,T,C or G
gactggaagagcactgttcactcctcacccttcaaatccctctgttggaggctcatcgttcctattcaggcagatgttatcgaggtccgacnnnnnnaaaaacccaaactcgaaccaaacaataaagatcggatacgcatgaggct

SEQ ID NO: 4200 - DNA, 146 bp, Artificial Sequence
  Bisulfite Padlock Probe
  misc_feature 93, 94, 95, 96, 97, 98: n = A,T,C or G
gactggaagagcactgttcactcgaaaaaccactcaccaatatagttggaggctcatcgttcctattcaggcagatgttatcgaggtccgacnnnnnnaaactaccgcgaaaaaccttaccacaatgatcggatacgcatgaggct

SEQ ID NO: 4201 - DNA, 146 bp, Artificial Sequence
  Bisulfite Padlock Probe
  misc_feature 93, 94, 95, 96, 97, 98: n = A,T,C or G
gactggaagagcactgttcactcgaaaaaccgctcaccaatatagttggaggctcatcgttcctattcaggcagatgttatcgaggtccgacnnnnnnaaactaccgcgaaaaaccttaccgcaatgatcggatacgcatgaggct

SEQ ID NO: 4202 - DNA, 146 bp, Artificial Sequence
  Bisulfite Padlock Probe
  misc_feature 95, 96, 97, 98, 99, 100: n = A,T,C or G
gactggaagagcactgttcactcgctacctacacaaaacactaaacgttggaggctcatcgttcctattcaggcagatgttatcgaggtccgacnnnnnnaaaaaccaaaaactaaaatctaaaaagatcggatacgcatgaggct

SEQ ID NO: 4203 - DNA, 146 bp, Artificial Sequence
  Bisulfite Padlock Probe
  misc_feature 95, 96, 97, 98, 99, 100: n = A,T,C or G
gactggaagagcactgttcactcgctacctacacaaaacgctaaacgttggaggctcatcgttcctattcaggcagatgttatcgaggtccgacnnnnnnaaaaaccgaaaactaaaatctaaaaagatcggatacgcatgaggct

SEQ ID NO: 4204 - DNA, 146 bp, Artificial Sequence
  Bisulfite Padlock Probe
  misc_feature 94, 95, 96, 97, 98, 99: n = A,T,C or G
gactggaagagcactgttcactctaaaacctacgacaaccttcccgttggaggctcatcgttcctattcaggcagatgttatcgaggtccgacnnnnnnaaaaactcaacgaacccttaacgcaacgatcggatacgcatgaggct

SEQ ID NO: 4205 - DNA, 146 bp, Artificial Sequence
  Bisulfite Padlock Probe
  misc_feature 94, 95, 96, 97, 98, 99: n = A,T,C or G
gactggaagagcactgttcactctaaaacctacgacgaccttcccgttggaggctcatcgttcctattcaggcagatgttatcgaggtccgacnnnnnnaaaaactcaacgaacccttaacgcgacgatcggatacgcatgaggct

SEQ ID NO: 4206 - DNA, 146 bp, Artificial Sequence
  Bisulfite Padlock Probe
  misc_feature 93, 94, 95, 96, 97, 98: n = A,T,C or G
gactggaagagcactgttcacttaaaataataataataatacacgttggaggctcatcgttcctattcaggcagatgttatcgaggtccgacnnnnnncctaacaacgcgacgactacgaacaaaagatcggatacgcatgaggct

SEQ ID NO: 4207 - DNA, 146 bp, Artificial Sequence
  Bisulfite Padlock Probe
  misc_feature 93, 94, 95, 96, 97, 98: n = A,T,C or G
gactggaagagcactgttcacttaaaataataataataatacgcgttggaggctcatcgttcctattcaggcagatgttatcgaggtccgacnnnnnncctaacaacgcgacgactacgaacgaaagatcggatacgcatgaggct

SEQ ID NO: 4208 - DNA, 146 bp, Artificial Sequence
  Bisulfite Padlock Probe
  misc_feature 93, 94, 95, 96, 97, 98: n = A,T,C or G
gactggaagagcactgttcacttaataaaacttaaaaacctaaagttggaggctcatcgttcctattcaggcagatgttatcgaggtccgacnnnnnntcttatttctccaacacctctaacctccgatcggatacgcatgaggct

SEQ ID NO: 4209 - DNA, 146 bp, Artificial Sequence
  Bisulfite Padlock Probe
  misc_feature 93, 94, 95, 96, 97, 98: n = A,T,C or G
gactggaagagcactgttcacttaataaaacttaaaaacctaaagttggaggctcatcgttcctattcaggcagatgttatcgaggtccgacnnnnnntcttatttctccaacgcctctaacctccgatcggatacgcatgaggct

SEQ ID NO: 4210 - DNA, 146 bp, Artificial Sequence
  Bisulfite Padlock Probe
  misc_feature 92, 93, 94, 95, 96, 97: n = A,T,C or G
gactggaagagcactgttcacttcactccttacctaaaaactcgttggaggctcatcgttcctattcaggcagatgttatcgaggtccgacnnnnnnaaaaactttactcacctacccaactcttcgatcggatacgcatgaggct

SEQ ID NO: 4211 - DNA, 146 bp, Artificial Sequence
  Bisulfite Padlock Probe
  misc_feature 94, 95, 96, 97, 98, 99: n = A,T,C or G
gactggaagagcactgttcacttcctctacataaacttccaaaaagttggaggctcatcgttcctattcaggcagatgttatcgaggtccgacnnnnnnaaaaacaaaaccacaaaaattcaaaaagatcggatacgcatgaggct

SEQ ID NO: 4212 - DNA, 146 bp, Artificial Sequence
  Bisulfite Padlock Probe
  misc_feature 92, 93, 94, 95, 96, 97: n = A,T,C or G
gactggaagagcactgttcacttcgctccttacctaaaaactcgttggaggctcatcgttcctattcaggcagatgttatcgaggtccgacnnnnnnaaaaactttactcacctacccgactcttcgatcggatacgcatgaggct

SEQ ID NO: 4213 - DNA, 146 bp, Artificial Sequence
  Bisulfite Padlock Probe
  misc_feature 95, 96, 97, 98, 99, 100: n = A,T,C or G
gactggaagagcactgttcacttctaaccacaacaaacccaaaaccgttggaggctcatcgttcctattcaggcagatgttatcgaggtccgacnnnnnnacgaaaactctccgaaaccaccattcgatcggatacgcatgaggct

SEQ ID NO: 4214 - DNA, 146 bp, Artificial Sequence
  Bisulfite Padlock Probe
  misc_feature 95, 96, 97, 98, 99, 100: n = A,T,C or G
gactggaagagcactgttcacttctaaccgcaacaaacccaaaaccgttggaggctcatcgttcctattcaggcagatgttatcgaggtccgacnnnnnnacgaaaactctccgaaaccgccattcgatcggatacgcatgaggct

SEQ ID NO: 4215 - DNA, 146 bp, Artificial Sequence
  Bisulfite Padlock Probe
  misc_feature 92, 93, 94, 95, 96, 97: n = A,T,C or G
gactggaagagcactgttcactttcaataaaaccccactaactgttggaggctcatcgttcctattcaggcagatgttatcgaggtccgacnnnnnnaaaaacacatacaaaccaaaaccctcaacgatcggatacgcatgaggct

SEQ ID NO: 4216 - DNA, 146 bp, Artificial Sequence
  Bisulfite Padlock Probe
  misc_feature 92, 93, 94, 95, 96, 97: n = A,T,C or G
gactggaagagcactgttcactttcaataaaaccccgctaactgttggaggctcatcgttcctattcaggcagatgttatcgaggtccgacnnnnnnaaaaacacatacaaaccgaaaccctcaacgatcggatacgcatgaggct

SEQ ID NO: 4217 - DNA, 146 bp, Artificial Sequence
  Bisulfite Padlock Probe
  misc_feature 94, 95, 96, 97, 98, 99: n = A,T,C or G
gactggaagagcactgttcataaaaacctaaacttttctaccctagttggaggctcatcgttcctattcaggcagatgttatcgaggtccgacnnnnnnaaaaccttaaaacatataactatcacagatcggatacgcatgaggct

SEQ ID NO: 4218 - DNA, 146 bp, Artificial Sequence
  Bisulfite Padlock Probe
  misc_feature 94, 95, 96, 97, 98, 99: n = A,T,C or G
gactggaagagcactgttcataaaaacctaaacttttctaccctagttggaggctcatcgttcctattcaggcagatgttatcgaggtccgacnnnnnnaaaaccttaaaacgtataactatcacagatcggatacgcatgaggct

SEQ ID NO: 4219 - DNA, 146 bp, Artificial Sequence
  Bisulfite Padlock Probe
  misc_feature 92, 93, 94, 95, 96, 97: n = A,T,C or G
gactggaagagcactgttcataaaacaaattaacacccaaaacgttggaggctcatcgttcctattcaggcagatgttatcgaggtccgacnnnnnnaaaattcacaacctactcctctctaaaacgatcggatacgcatgaggct

SEQ ID NO: 4220 - DNA, 146 bp, Artificial Sequence
  Bisulfite Padlock Probe
  misc_feature 92, 93, 94, 95, 96, 97: n = A,T,C or G
gactggaagagcactgttcataaaacaaattaacgcccaaaacgttggaggctcatcgttcctattcaggcagatgttatcgaggtccgacnnnnnnaaaattcacaacctactcctctctaaaacgatcggatacgcatgaggct

SEQ ID NO: 4221 - DNA, 146 bp, Artificial Sequence
  Bisulfite Padlock Probe
  misc_feature 95, 96, 97, 98, 99, 100: n = A,T,C or G
gactggaagagcactgttcataaaccgcgcgaaaatcaaaaccctcgttggaggctcatcgttcctattcaggcagatgttatcgaggtccgacnnnnnnaatttactcaactcaacccccaaaacgatcggatacgcatgaggct

SEQ ID NO: 4222 - DNA, 146 bp, Artificial Sequence
  Bisulfite Padlock Probe
  misc_feature 95, 96, 97, 98, 99, 100: n = A,T,C or G
gactggaagagcactgttcataaaccgcgcgaaaatcgaaaccctcgttggaggctcatcgttcctattcaggcagatgttatcgaggtccgacnnnnnnaatttactcgactcaacccccaaaacgatcggatacgcatgaggct

SEQ ID NO: 4223 - DNA, 146 bp, Artificial Sequence
  Bisulfite Padlock Probe
  misc_feature 94, 95, 96, 97, 98, 99: n = A,T,C or G
gactggaagagcactgttcataaatcaacaatctcaaacaccacagttggaggctcatcgttcctattcaggcagatgttatcgaggtccgacnnnnnnctctaaacgctcaaaacccacacatacgatcggatacgcatgaggct

SEQ ID NO: 4224 - DNA, 146 bp, Artificial Sequence
  Bisulfite Padlock Probe
  misc_feature 94, 95, 96, 97, 98, 99: n = A,T,C or G
gactggaagagcactgttcataaatcaacaatctcaaacaccacagttggaggctcatcgttcctattcaggcagatgttatcgaggtccgacnnnnnnctctaaacgctcaaaacccgcacatacgatcggatacgcatgaggct

SEQ ID NO: 4225 - DNA, 146 bp, Artificial Sequence
  Bisulfite Padlock Probe
  misc_feature 96, 97, 98, 99, 100, 101: n = A,T,C or G
gactggaagagcactgttcataaattctaacaacatccactacaaccgttggaggctcatcgttcctattcaggcagatgttatcgaggtccgacnnnnnnaaaaacttactaaaaataacaaaaagatcggatacgcatgaggct

SEQ ID NO: 4226 - DNA, 146 bp, Artificial Sequence
  Bisulfite Padlock Probe
  misc_feature 93, 94, 95, 96, 97, 98: n = A,T,C or G
gactggaagagcactgttcataacaaacctcaataaacctaaacgttggaggctcatcgttcctattcaggcagatgttatcgaggtccgacnnnnnnactactccaccccactataaacacaaccgatcggatacgcatgaggct

SEQ ID NO: 4227 - DNA, 146 bp, Artificial Sequence
  Bisulfite Padlock Probe
  misc_feature 93, 94, 95, 96, 97, 98: n = A,T,C or G
gactggaagagcactgttcataacaaacctcaataaacctaaacgttggaggctcatcgttcctattcaggcagatgttatcgaggtccgacnnnnnnactactccgccccactataaacacaaccgatcggatacgcatgaggct

SEQ ID NO: 4228 - DNA, 146 bp, Artificial Sequence
  Bisulfite Padlock Probe
  misc_feature 92, 93, 94, 95, 96, 97: n = A,T,C or G
gactggaagagcactgttcataacaatcacaacctaccattaagttggaggctcatcgttcctattcaggcagatgttatcgaggtccgacnnnnnntaatccaatcaaaacaacattctaactctgatcggatacgcatgaggct

SEQ ID NO: 4229 - DNA, 146 bp, Artificial Sequence
  Bisulfite Padlock Probe
  misc_feature 96, 97, 98, 99, 100, 101: n = A,T,C or G
gactggaagagcactgttcataacacaaaaactactaaaaataacaagttggaggctcatcgttcctattcaggcagatgttatcgaggtccgacnnnnnnaaaaacgaattctcaaaacccgacagatcggatacgcatgaggct

SEQ ID NO: 4230 - DNA, 146 bp, Artificial Sequence
  Bisulfite Padlock Probe
  misc_feature 92, 93, 94, 95, 96, 97: n = A,T,C or G
gactggaagagcactgttcataaccaacatctaaaaacaaaaagttggaggctcatcgttcctattcaggcagatgttatcgaggtccgacnnnnnncgaaacgcaaaacgccaaaaactcaaaaagatcggatacgcatgaggct

SEQ ID NO: 4231 - DNA, 146 bp, Artificial Sequence
  Bisulfite Padlock Probe
  misc_feature 96, 97, 98, 99, 100, 101: n = A,T,C or G
gactggaagagcactgttcataacgcaaaaactactaaaaataacaagttggaggctcatcgttcctattcaggcagatgttatcgaggtccgacnnnnnnaaaaacgaattctcaaaacccgacggatcggatacgcatgaggct

SEQ ID NO: 4232 - DNA, 146 bp, Artificial Sequence
  Bisulfite Padlock Probe
  misc_feature 96, 97, 98, 99, 100, 101: n = A,T,C or G
gactggaagagcactgttcataacgccgaaaataaaaacgaccacctgttggaggctcatcgttcctattcaggcagatgttatcgaggtccgacnnnnnnaaaactctccgcgaaccgaaccaaagatcggatacgcatgaggct

SEQ ID NO: 4233 - DNA, 146 bp, Artificial Sequence
  Bisulfite Padlock Probe
  misc_feature 96, 97, 98, 99, 100, 101: n = A,T,C or G
gactggaagagcactgttcataacgccgaaaataaaaacgaccgcctgttggaggctcatcgttcctattcaggcagatgttatcgaggtccgacnnnnnnaaaactctccgcgaaccgaaccgaagatcggatacgcatgaggct

SEQ ID NO: 4234 - DNA, 146 bp, Artificial Sequence
  Bisulfite Padlock Probe
  misc_feature 96, 97, 98, 99, 100, 101: n = A,T,C or G
gactggaagagcactgttcataactacccgaaaaccccatccaaatcgttggaggctcatcgttcctattcaggcagatgttatcgaggtccgacnnnnnncaccgcctttccgacctaataacacgatcggatacgcatgaggct

SEQ ID NO: 4235 - DNA, 146 bp, Artificial Sequence
  Bisulfite Padlock Probe
  misc_feature 96, 97, 98, 99, 100, 101: n = A,T,C or G
gactggaagagcactgttcataactacccgaaaaccccgtccaaatcgttggaggctcatcgttcctattcaggcagatgttatcgaggtccgacnnnnnncaccgcctttccgacctaataacgcgatcggatacgcatgaggct

SEQ ID NO: 4236 - DNA, 146 bp, Artificial Sequence
  Bisulfite Padlock Probe
  misc_feature 93, 94, 95, 96, 97, 98: n = A,T,C or G
gactggaagagcactgttcataacttacttctactaaacaaaaagttggaggctcatcgttcctattcaggcagatgttatcgaggtccgacnnnnnnatcttcaacacaaatatttcctccaacagatcggatacgcatgaggct

SEQ ID NO: 4237 - DNA, 146 bp, Artificial Sequence
  Bisulfite Padlock Probe
  misc_feature 93, 94, 95, 96, 97, 98: n = A,T,C or G
gactggaagagcactgttcataataatacgctcccacaactaatgttggaggctcatcgttcctattcaggcagatgttatcgaggtccgacnnnnnnccaactcgaaacgattcccaaaataaccgatcggatacgcatgaggct

SEQ ID NO: 4238 - DNA, 146 bp, Artificial Sequence
  Bisulfite Padlock Probe
  misc_feature 93, 94, 95, 96, 97, 98: n = A,T,C or G
gactggaagagcactgttcataataatacgctcccgcaactaatgttggaggctcatcgttcctattcaggcagatgttatcgaggtccgacnnnnnnccaactcgaaacgattcccgaaataaccgatcggatacgcatgaggct

SEQ ID NO: 4239 - DNA, 146 bp, Artificial Sequence
  Bisulfite Padlock Probe
  misc_feature 93, 94, 95, 96, 97, 98: n = A,T,C or G
gactggaagagcactgttcataatattatatatacatacttaccgttggaggctcatcgttcctattcaggcagatgttatcgaggtccgacnnnnnnctccacctaaactaaaactaaataaaaagatcggatacgcatgaggct

SEQ ID NO: 4240 - DNA, 146 bp, Artificial Sequence
  Bisulfite Padlock Probe
  misc_feature 93, 94, 95, 96, 97, 98: n = A,T,C or G
gactggaagagcactgttcataatattatatatacgtacttaccgttggaggctcatcgttcctattcaggcagatgttatcgaggtccgacnnnnnnctccgcctaaactaaaactaaataaaaagatcggatacgcatgaggct

SEQ ID NO: 4241 - DNA, 146 bp, Artificial Sequence
  Bisulfite Padlock Probe
  misc_feature 95, 96, 97, 98, 99, 100: n = A,T,C or G
gactggaagagcactgttcataatcactcgcacactcactccaatagttggaggctcatcgttcctattcaggcagatgttatcgaggtccgacnnnnnnaaaaacgacgaaaatccaactaaaaagatcggatacgcatgaggct

SEQ ID NO: 4242 - DNA, 146 bp, Artificial Sequence
  Bisulfite Padlock Probe
  misc_feature 95, 96, 97, 98, 99, 100: n = A,T,C or G
gactggaagagcactgttcataatcactcgcacactcgctccaatagttggaggctcatcgttcctattcaggcagatgttatcgaggtccgacnnnnnnaaaaacgacgaaaatccgactaaaaagatcggatacgcatgaggct

SEQ ID NO: 4243 - DNA, 146 bp, Artificial Sequence
  Bisulfite Padlock Probe
  misc_feature 96, 97, 98, 99, 100, 101: n = A,T,C or G
gactggaagagcactgttcataattcaaaaacttaataaaacaactagttggaggctcatcgttcctattcaggcagatgttatcgaggtccgacnnnnnntcccaaacctacgaacgcacctaacgatcggatacgcatgaggct

SEQ ID NO: 4244 - DNA, 146 bp, Artificial Sequence
  Bisulfite Padlock Probe
  misc_feature 96, 97, 98, 99, 100, 101: n = A,T,C or G
gactggaagagcactgttcataattcgaaaacttaataaaacaactagttggaggctcatcgttcctattcaggcagatgttatcgaggtccgacnnnnnntcccaaacctacgaacgcgcctaacgatcggatacgcatgaggct

SEQ ID NO: 4245 - DNA, 146 bp, Artificial Sequence
  Bisulfite Padlock Probe
  misc_feature 92, 93, 94, 95, 96, 97: n = A,T,C or G
gactggaagagcactgttcatacaaccgaaacaactaaacaacgttggaggctcatcgttcctattcaggcagatgttatcgaggtccgacnnnnnnccccctcaatccccttacctaaaactaaagatcggatacgcatgaggct

SEQ ID NO: 4246 - DNA, 146 bp, Artificial Sequence
  Bisulfite Padlock Probe
  misc_feature 92, 93, 94, 95, 96, 97: n = A,T,C or G
gactggaagagcactgttcatacaaccgaaacgactaaacaacgttggaggctcatcgttcctattcaggcagatgttatcgaggtccgacnnnnnnccccctcgatccccttacctaaaactaaagatcggatacgcatgaggct

SEQ ID NO: 4247 - DNA, 146 bp, Artificial Sequence
  Bisulfite Padlock Probe
  misc_feature 95, 96, 97, 98, 99, 100: n = A,T,C or G
gactggaagagcactgttcatacatccaacacacacaacacaacaagttggaggctcatcgttcctattcaggcagatgttatcgaggtccgacnnnnnnataaatactctaaaactacaactcccgatcggatacgcatgaggct

SEQ ID NO: 4248 - DNA, 146 bp, Artificial Sequence
  Bisulfite Padlock Probe
  misc_feature 95, 96, 97, 98, 99, 100: n = A,T,C or G
gactggaagagcactgttcatacgaacaacgcttacacaaccctaagttggaggctcatcgttcctattcaggcagatgttatcgaggtccgacnnnnnnctaatccacccaacctcccctaaaccgatcggatacgcatgaggct

SEQ ID NO: 4249 - DNA, 146 bp, Artificial Sequence
  Bisulfite Padlock Probe
  misc_feature 95, 96, 97, 98, 99, 100: n = A,T,C or G
gactggaagagcactgttcatacgaacaacgcttacacgaccctaagttggaggctcatcgttcctattcaggcagatgttatcgaggtccgacnnnnnnctaatccgcccaacctcccctaaaccgatcggatacgcatgaggct

SEQ ID NO: 4250 - DNA, 146 bp, Artificial Sequence
  Bisulfite Padlock Probe
  misc_feature 96, 97, 98, 99, 100, 101: n = A,T,C or G
gactggaagagcactgttcatacgtacgcccaatacaacaaaaccttgttggaggctcatcgttcctattcaggcagatgttatcgaggtccgacnnnnnnaaaaacccttcccctacgccaaatagatcggatacgcatgaggct

SEQ ID NO: 4251 - DNA, 146 bp, Artificial Sequence
  Bisulfite Padlock Probe
  misc_feature 96, 97, 98, 99, 100, 101: n = A,T,C or G
gactggaagagcactgttcatacgtacgcccaatacgacaaaaccttgttggaggctcatcgttcctattcaggcagatgttatcgaggtccgacnnnnnnaaaaacccttcccctacgccgaatagatcggatacgcatgaggct

SEQ ID NO: 4252 - DNA, 146 bp, Artificial Sequence
  Bisulfite Padlock Probe
  misc_feature 94, 95, 96, 97, 98, 99: n = A,T,C or G
gactggaagagcactgttcatacgtacgtccttaacgcccaatacgttggaggctcatcgttcctattcaggcagatgttatcgaggtccgacnnnnnnaaaaacccaccaaaccaaacactcaccgatcggatacgcatgaggct

SEQ ID NO: 4253 - DNA, 146 bp, Artificial Sequence
  Bisulfite Padlock Probe
  misc_feature 94, 95, 96, 97, 98, 99: n = A,T,C or G
gactggaagagcactgttcatacgtacgtccttaacgcccgatacgttggaggctcatcgttcctattcaggcagatgttatcgaggtccgacnnnnnnaaaaacccaccaaaccaaacactcaccgatcggatacgcatgaggct

SEQ ID NO: 4254 - DNA, 146 bp, Artificial Sequence
  Bisulfite Padlock Probe
  misc_feature 94, 95, 96, 97, 98, 99: n = A,T,C or G
gactggaagagcactgttcatactctacacgcgtatatacaacccgttggaggctcatcgttcctattcaggcagatgttatcgaggtccgacnnnnnnacgaccccgtaatacaataaaacaaacgatcggatacgcatgaggct

SEQ ID NO: 4255 - DNA, 146 bp, Artificial Sequence
  Bisulfite Padlock Probe
  misc_feature 94, 95, 96, 97, 98, 99: n = A,T,C or G
gactggaagagcactgttcatactctacacgcgtatatacgacccgttggaggctcatcgttcctattcaggcagatgttatcgaggtccgacnnnnnnacgaccccgtaatacgataaaacaaacgatcggatacgcatgaggct

SEQ ID NO: 4256 - DNA, 146 bp, Artificial Sequence
  Bisulfite Padlock Probe
  misc_feature 96, 97, 98, 99, 100, 101: n = A,T,C or G
gactggaagagcactgttcatatcccgacaattctactcatcaaccagttggaggctcatcgttcctattcaggcagatgttatcgaggtccgacnnnnnncctacgaaaccacctccacacactcgatcggatacgcatgaggct

SEQ ID NO: 4257 - DNA, 146 bp, Artificial Sequence
  Bisulfite Padlock Probe
  misc_feature 96, 97, 98, 99, 100, 101: n = A,T,C or G
gactggaagagcactgttcatatcccgacaattctactcatcaaccggttggaggctcatcgttcctattcaggcagatgttatcgaggtccgacnnnnnncctacgaaaccacctccgcacactcgatcggatacgcatgaggct

SEQ ID NO: 4258 - DNA, 146 bp, Artificial Sequence
  Bisulfite Padlock Probe
  misc_feature 95, 96, 97, 98, 99, 100: n = A,T,C or G
gactggaagagcactgttcatattcaacacctacctctacttcaaagttggaggctcatcgttcctattcaggcagatgttatcgaggtccgacnnnnnnccaactacgccgactactaaactcacgatcggatacgcatgaggct

SEQ ID NO: 4259 - DNA, 146 bp, Artificial Sequence
  Bisulfite Padlock Probe
  misc_feature 95, 96, 97, 98, 99, 100: n = A,T,C or G
gactggaagagcactgttcatattcaacgcctacctctacttcaaagttggaggctcatcgttcctattcaggcagatgttatcgaggtccgacnnnnnnccaactacgccgactactaaactcgcgatcggatacgcatgaggct

SEQ ID NO: 4260 - DNA, 146 bp, Artificial Sequence
  Bisulfite Padlock Probe
  misc_feature 96, 97, 98, 99, 100, 101: n = A,T,C or G
gactggaagagcactgttcatatttactattattattattctttctagttggaggctcatcgttcctattcaggcagatgttatcgaggtccgacnnnnnnactcatctttatctacactctaatcgatcggatacgcatgaggct

SEQ ID NO: 4261 - DNA, 146 bp, Artificial Sequence
  Bisulfite Padlock Probe
  misc_feature 94, 95, 96, 97, 98, 99: n = A,T,C or G
gactggaagagcactgttcatcacaaatactcctactcccttaaagttggaggctcatcgttcctattcaggcagatgttatcgaggtccgacnnnnnnacctcactaataaaacacacctaaaccgatcggatacgcatgaggct

SEQ ID NO: 4262 - DNA, 146 bp, Artificial Sequence
  Bisulfite Padlock Probe
  misc_feature 92, 93, 94, 95, 96, 97: n = A,T,C or G
gactggaagagcactgttcatcacccatcacccctaacctaacgttggaggctcatcgttcctattcaggcagatgttatcgaggtccgacnnnnnnatcaaaatcacttctttccaaaaaccctagatcggatacgcatgaggct

SEQ ID NO: 4263 - DNA, 146 bp, Artificial Sequence
  Bisulfite Padlock Probe
  misc_feature 93, 94, 95, 96, 97, 98: n = A,T,C or G
gactggaagagcactgttcatcatcaaaacctcaaacccaaaaagttggaggctcatcgttcctattcaggcagatgttatcgaggtccgacnnnnnncctttcaaaataacaactataaaccccagatcggatacgcatgaggct

SEQ ID NO: 4264 - DNA, 146 bp, Artificial Sequence
  Bisulfite Padlock Probe
  misc_feature 93, 94, 95, 96, 97, 98: n = A,T,C or G
gactggaagagcactgttcatcatcctaaaacgaaaacatatacgttggaggctcatcgttcctattcaggcagatgttatcgaggtccgacnnnnnnaaaaatacccctttaaacacttaaaaccgatcggatacgcatgaggct

SEQ ID NO: 4265 - DNA, 146 bp, Artificial Sequence
  Bisulfite Padlock Probe
  misc_feature 93, 94, 95, 96, 97, 98: n = A,T,C or G
gactggaagagcactgttcatcatcctaaaacgaaaacgtatacgttggaggctcatcgttcctattcaggcagatgttatcgaggtccgacnnnnnnaaaaatacccctttaaacgcttaaaaccgatcggatacgcatgaggct

SEQ ID NO: 4266 - DNA, 146 bp, Artificial Sequence
  Bisulfite Padlock Probe
  misc_feature 96, 97, 98, 99, 100, 101: n = A,T,C or G
gactggaagagcactgttcatccaaccctaattcttccaaaaattacgttggaggctcatcgttcctattcaggcagatgttatcgaggtccgacnnnnnnaaaaattaaactaccccctccccacgatcggatacgcatgaggct

SEQ ID NO: 4267 - DNA, 146 bp, Artificial Sequence
  Bisulfite Padlock Probe
  misc_feature 96, 97, 98, 99, 100, 101: n = A,T,C or G
gactggaagagcactgttcatccaaccctaattcttccgaaaattacgttggaggctcatcgttcctattcaggcagatgttatcgaggtccgacnnnnnnaaaaattaaactaccccctccccgcgatcggatacgcatgaggct

SEQ ID NO: 4268 - DNA, 146 bp, Artificial Sequence
  Bisulfite Padlock Probe
  misc_feature 95, 96, 97, 98, 99, 100: n = A,T,C or G
gactggaagagcactgttcatcccctcgcacacacctaaactaatcgttggaggctcatcgttcctattcaggcagatgttatcgaggtccgacnnnnnnctcaaaccaaataaccgacacaataagatcggatacgcatgaggct

SEQ ID NO: 4269 - DNA, 146 bp, Artificial Sequence
  Bisulfite Padlock Probe
  misc_feature 95, 96, 97, 98, 99, 100: n = A,T,C or G
gactggaagagcactgttcatcccctcgcgcacacctaaactaatcgttggaggctcatcgttcctattcaggcagatgttatcgaggtccgacnnnnnnctcaaaccaaataaccgacgcaataagatcggatacgcatgaggct

SEQ ID NO: 4270 - DNA, 146 bp, Artificial Sequence
  Bisulfite Padlock Probe
  misc_feature 92, 93, 94, 95, 96, 97: n = A,T,C or G
gactggaagagcactgttcatccctacaaacaaaataaatatcgttggaggctcatcgttcctattcaggcagatgttatcgaggtccgacnnnnnnaaaaatcatcacaattaataccctccatagatcggatacgcatgaggct

SEQ ID NO: 4271 - DNA, 146 bp, Artificial Sequence
  Bisulfite Padlock Probe
  misc_feature 92, 93, 94, 95, 96, 97: n = A,T,C or G
gactggaagagcactgttcatccgcctttcctccacctaaaacgttggaggctcatcgttcctattcaggcagatgttatcgaggtccgacnnnnnnaacattttcctaacataaaaaccctttaagatcggatacgcatgaggct

SEQ ID NO: 4272 - DNA, 146 bp, Artificial Sequence
  Bisulfite Padlock Probe
  misc_feature 92, 93, 94, 95, 96, 97: n = A,T,C or G
gactggaagagcactgttcatccgcctttcctccgcctaaaacgttggaggctcatcgttcctattcaggcagatgttatcgaggtccgacnnnnnnaacattttcctaacataaaaaccctttaagatcggatacgcatgaggct

SEQ ID NO: 4273 - DNA, 146 bp, Artificial Sequence
  Bisulfite Padlock Probe
  misc_feature 93, 94, 95, 96, 97, 98: n = A,T,C or G
gactggaagagcactgttcatcctaatataaacgacaaaaaaccgttggaggctcatcgttcctattcaggcagatgttatcgaggtccgacnnnnnnattccctaatatttaaaccacaaaactcgatcggatacgcatgaggct

SEQ ID NO: 4274 - DNA, 146 bp, Artificial Sequence
  Bisulfite Padlock Probe
  misc_feature 93, 94, 95, 96, 97, 98: n = A,T,C or G
gactggaagagcactgttcatcctaatataaacgacgaaaaaccgttggaggctcatcgttcctattcaggcagatgttatcgaggtccgacnnnnnnattccctaatatttaaaccacaaaactcgatcggatacgcatgaggct

SEQ ID NO: 4275 - DNA, 146 bp, Artificial Sequence
  Bisulfite Padlock Probe
  misc_feature 96, 97, 98, 99, 100, 101: n = A,T,C or G
gactggaagagcactgttcatcctacccattaacaaaataatttcctgttggaggctcatcgttcctattcaggcagatgttatcgaggtccgacnnnnnngctaccccgaaccctaaacaaaaccgatcggatacgcatgaggct

SEQ ID NO: 4276 - DNA, 146 bp, Artificial Sequence
  Bisulfite Padlock Probe
  misc_feature 96, 97, 98, 99, 100, 101: n = A,T,C or G
gactggaagagcactgttcatcctacccattaacgaaataatttcctgttggaggctcatcgttcctattcaggcagatgttatcgaggtccgacnnnnnngctaccccgaaccctaaacgaaaccgatcggatacgcatgaggct

SEQ ID NO: 4277 - DNA, 146 bp, Artificial Sequence
  Bisulfite Padlock Probe
  misc_feature 94, 95, 96, 97, 98, 99: n = A,T,C or G
gactggaagagcactgttcatcctcgcaaaactcaaaataattccgttggaggctcatcgttcctattcaggcagatgttatcgaggtccgacnnnnnnacacgatcccccacaaaatcctcaaaagatcggatacgcatgaggct

SEQ ID NO: 4278 - DNA, 146 bp, Artificial Sequence
  Bisulfite Padlock Probe
  misc_feature 94, 95, 96, 97, 98, 99: n = A,T,C or G
gactggaagagcactgttcatcctcgcgaaactcaaaataattccgttggaggctcatcgttcctattcaggcagatgttatcgaggtccgacnnnnnnacacgatcccccgcaaaatcctcaaaagatcggatacgcatgaggct

SEQ ID NO: 4279 - DNA, 146 bp, Artificial Sequence
  Bisulfite Padlock Probe
  misc_feature 96, 97, 98, 99, 100, 101: n = A,T,C or G
gactggaagagcactgttcatcgaaaccatacgcgccaaaatactacgttggaggctcatcgttcctattcaggcagatgttatcgaggtccgacnnnnnntaacaaaactcgaacccgcaaaaaagatcggatacgcatgaggct

SEQ ID NO: 4280 - DNA, 146 bp, Artificial Sequence
  Bisulfite Padlock Probe
  misc_feature 96, 97, 98, 99, 100, 101: n = A,T,C or G
gactggaagagcactgttcatcgaaaccatacgcgccgaaatactacgttggaggctcatcgttcctattcaggcagatgttatcgaggtccgacnnnnnntaacaaaactcgaacccgcgaaaaagatcggatacgcatgaggct

SEQ ID NO: 4281 - DNA, 146 bp, Artificial Sequence
  Bisulfite Padlock Probe
  misc_feature 95, 96, 97, 98, 99, 100: n = A,T,C or G
gactggaagagcactgttcatcgaacgcgcaaaaaacctaaaaactgttggaggctcatcgttcctattcaggcagatgttatcgaggtccgacnnnnnnatatccgaaccactacctatacttccgatcggatacgcatgaggct

SEQ ID NO: 4282 - DNA, 146 bp, Artificial Sequence
  Bisulfite Padlock Probe
  misc_feature 95, 96, 97, 98, 99, 100: n = A,T,C or G
gactggaagagcactgttcatcgaacgcgcgaaaaacctaaaaactgttggaggctcatcgttcctattcaggcagatgttatcgaggtccgacnnnnnnatatccgaaccgctacctatacttccgatcggatacgcatgaggct

SEQ ID NO: 4283 - DNA, 146 bp, Artificial Sequence
  Bisulfite Padlock Probe
  misc_feature 94, 95, 96, 97, 98, 99: n = A,T,C or G
gactggaagagcactgttcatcgcaaatactcctactcccttaaagttggaggctcatcgttcctattcaggcagatgttatcgaggtccgacnnnnnnacctcactaataaaacgcacctaaaccgatcggatacgcatgaggct

SEQ ID NO: 4284 - DNA, 146 bp, Artificial Sequence
  Bisulfite Padlock Probe
  misc_feature 94, 95, 96, 97, 98, 99: n = A,T,C or G
gactggaagagcactgttcatcgtacacataccccaaaataaaaagttggaggctcatcgttcctattcaggcagatgttatcgaggtccgacnnnnnnaaaaacaaaaaccaaaactacctaaaagatcggatacgcatgaggct

SEQ ID NO: 4285 - DNA, 146 bp, Artificial Sequence
  Bisulfite Padlock Probe
  misc_feature 94, 95, 96, 97, 98, 99: n = A,T,C or G
gactggaagagcactgttcatcgtacacgtaccccaaaataaaaagttggaggctcatcgttcctattcaggcagatgttatcgaggtccgacnnnnnnaaaaacaaaaaccgaaactacctaaaagatcggatacgcatgaggct

SEQ ID NO: 4286 - DNA, 146 bp, Artificial Sequence
  Bisulfite Padlock Probe
  misc_feature 92, 93, 94, 95, 96, 97: n = A,T,C or G
gactggaagagcactgttcatctaaaacttaacaaaccaaaaagttggaggctcatcgttcctattcaggcagatgttatcgaggtccgacnnnnnnccgaaaacccgaaaaatccatcacctatcgatcggatacgcatgaggct

SEQ ID NO: 4287 - DNA, 146 bp, Artificial Sequence
  Bisulfite Padlock Probe
  misc_feature 92, 93, 94, 95, 96, 97: n = A,T,C or G
gactggaagagcactgttcatctaaaacttaacgaaccaaaaagttggaggctcatcgttcctattcaggcagatgttatcgaggtccgacnnnnnnccgaaaacccgaaaaatccatcgcctatcgatcggatacgcatgaggct

SEQ ID NO: 4288 - DNA, 146 bp, Artificial Sequence
  Bisulfite Padlock Probe
  misc_feature 94, 95, 96, 97, 98, 99: n = A,T,C or G
gactggaagagcactgttcatctaatccctaacccacacaaccacgttggaggctcatcgttcctattcaggcagatgttatcgaggtccgacnnnnnnaaactactctaaacaaaaacctaaaaagatcggatacgcatgaggct

SEQ ID NO: 4289 - DNA, 146 bp, Artificial Sequence
  Bisulfite Padlock Probe
  misc_feature 94, 95, 96, 97, 98, 99: n = A,T,C or G
gactggaagagcactgttcatctaatccctaacccacacaaccacgttggaggctcatcgttcctattcaggcagatgttatcgaggtccgacnnnnnnaaactactctaaacgaaaacctaaaaagatcggatacgcatgaggct

SEQ ID NO: 4290 - DNA, 146 bp, Artificial Sequence
  Bisulfite Padlock Probe
  misc_feature 96, 97, 98, 99, 100, 101: n = A,T,C or G
gactggaagagcactgttcatctacatattcgaaaacccacccctccgttggaggctcatcgttcctattcaggcagatgttatcgaggtccgacnnnnnnaaataacgataacgacaacaacaacgatcggatacgcatgaggct

SEQ ID NO: 4291 - DNA, 146 bp, Artificial Sequence
  Bisulfite Padlock Probe
  misc_feature 96, 97, 98, 99, 100, 101: n = A,T,C or G
gactggaagagcactgttcatctacatattcgaaaacccgcccctccgttggaggctcatcgttcctattcaggcagatgttatcgaggtccgacnnnnnnaaataacgataacgacgacaacaacgatcggatacgcatgaggct

SEQ ID NO: 4292 - DNA, 146 bp, Artificial Sequence
  Bisulfite Padlock Probe
  misc_feature 92, 93, 94, 95, 96, 97: n = A,T,C or G
gactggaagagcactgttcatctaccgaaacaaccaaacccccgttggaggctcatcgttcctattcaggcagatgttatcgaggtccgacnnnnnnaaaaactaaaacataaacctaacaaaaaagatcggatacgcatgaggct

SEQ ID NO: 4293 - DNA, 146 bp, Artificial Sequence
  Bisulfite Padlock Probe
  misc_feature 92, 93, 94, 95, 96, 97: n = A,T,C or G
gactggaagagcactgttcatctaccgaaacgaccaaacccccgttggaggctcatcgttcctattcaggcagatgttatcgaggtccgacnnnnnnaaaaactaaaacataaacctaacgaaaaagatcggatacgcatgaggct

SEQ ID NO: 4294 - DNA, 146 bp, Artificial Sequence
  Bisulfite Padlock Probe
  misc_feature 96, 97, 98, 99, 100, 101: n = A,T,C or G
gactggaagagcactgttcatctactttttcctctacaaccaaaaatgttggaggctcatcgttcctattcaggcagatgttatcgaggtccgacnnnnnnaaaaccccgaactaaacaacaaaacgatcggatacgcatgaggct

SEQ ID NO: 4295 - DNA, 146 bp, Artificial Sequence
  Bisulfite Padlock Probe
  misc_feature 96, 97, 98, 99, 100, 101: n = A,T,C or G
gactggaagagcactgttcatctactttttcctctacaaccgaaaatgttggaggctcatcgttcctattcaggcagatgttatcgaggtccgacnnnnnnaaaaccccgaactaaacgacaaaacgatcggatacgcatgaggct

SEQ ID NO: 4296 - DNA, 146 bp, Artificial Sequence
  Bisulfite Padlock Probe
  misc_feature 92, 93, 94, 95, 96, 97: n = A,T,C or G
gactggaagagcactgttcatctccctccaactccaatcttaagttggaggctcatcgttcctattcaggcagatgttatcgaggtccgacnnnnnnacactctttaaacaaactctaaccacaccgatcggatacgcatgaggct

SEQ ID NO: 4297 - DNA, 146 bp, Artificial Sequence
  Bisulfite Padlock Probe
  misc_feature 96, 97, 98, 99, 100, 101: n = A,T,C or G
gactggaagagcactgttcatctctaccaaaaatacaaacattaaccgttggaggctcatcgttcctattcaggcagatgttatcgaggtccgacnnnnnntatacacgaatatacgcaataaaaagatcggatacgcatgaggct

SEQ ID NO: 4298 - DNA, 146 bp, Artificial Sequence
  Bisulfite Padlock Probe
  misc_feature 96, 97, 98, 99, 100, 101: n = A,T,C or G
gactggaagagcactgttcatctctaccaaaaatacaaacattaaccgttggaggctcatcgttcctattcaggcagatgttatcgaggtccgacnnnnnntatacacgaatatacgcgataaaaagatcggatacgcatgaggct

SEQ ID NO: 4299 - DNA, 146 bp, Artificial Sequence
  Bisulfite Padlock Probe
  misc_feature 92, 93, 94, 95, 96, 97: n = A,T,C or G
gactggaagagcactgttcatcttcttccctaaacttaactacgttggaggctcatcgttcctattcaggcagatgttatcgaggtccgacnnnnnncaaccttaccaccctccctactactaaccgatcggatacgcatgaggct

SEQ ID NO: 4300 - DNA, 146 bp, Artificial Sequence
  Bisulfite Padlock Probe
  misc_feature 95, 96, 97, 98, 99, 100: n = A,T,C or G
gactggaagagcactgttcattaataaaatcaataaaatttaaaaagttggaggctcatcgttcctattcaggcagatgttatcgaggtccgacnnnnnnctctctacataccctaacaaacaaacgatcggatacgcatgaggct

SEQ ID NO: 4301 - DNA, 146 bp, Artificial Sequence
  Bisulfite Padlock Probe
  misc_feature 93, 94, 95, 96, 97, 98: n = A,T,C or G
gactggaagagcactgttcattcatccccaaataactctactcagttggaggctcatcgttcctattcaggcagatgttatcgaggtccgacnnnnnnaaacaacccctactcacctaactaatacgatcggatacgcatgaggct

SEQ ID NO: 4302 - DNA, 146 bp, Artificial Sequence
  Bisulfite Padlock Probe
  misc_feature 93, 94, 95, 96, 97, 98: n = A,T,C or G
gactggaagagcactgttcattcatccccaaataactctactcagttggaggctcatcgttcctattcaggcagatgttatcgaggtccgacnnnnnnaaacaacccctactcgcctaactaatacgatcggatacgcatgaggct

SEQ ID NO: 4303 - DNA, 146 bp, Artificial Sequence
  Bisulfite Padlock Probe
  misc_feature 92, 93, 94, 95, 96, 97: n = A,T,C or G
gactggaagagcactgttcatttacaaatccccacgataacaagttggaggctcatcgttcctattcaggcagatgttatcgaggtccgacnnnnnnaaaacccaaaaacaaatccttactaaatagatcggatacgcatgaggct

SEQ ID NO: 4304 - DNA, 146 bp, Artificial Sequence
  Bisulfite Padlock Probe
  misc_feature 92, 93, 94, 95, 96, 97: n = A,T,C or G
gactggaagagcactgttcatttacaaatccccacgataacgagttggaggctcatcgttcctattcaggcagatgttatcgaggtccgacnnnnnnaaaacccaaaaacgaatccttactaaatagatcggatacgcatgaggct

SEQ ID NO: 4305 - DNA, 146 bp, Artificial Sequence
  Bisulfite Padlock Probe
  misc_feature 96, 97, 98, 99, 100, 101: n = A,T,C or G
gactggaagagcactgttcatttaccatccaaacaaaaacttaaatcgttggaggctcatcgttcctattcaggcagatgttatcgaggtccgacnnnnnnccgcccccaacaaaaccaaactaaagatcggatacgcatgaggct

SEQ ID NO: 4306 - DNA, 146 bp, Artificial Sequence
  Bisulfite Padlock Probe
  misc_feature 96, 97, 98, 99, 100, 101: n = A,T,C or G
gactggaagagcactgttcatttaccatccgaacaaaaacttaaatcgttggaggctcatcgttcctattcaggcagatgttatcgaggtccgacnnnnnnccgcccccaacgaaaccaaactaaagatcggatacgcatgaggct

SEQ ID NO: 4307 - DNA, 146 bp, Artificial Sequence
  Bisulfite Padlock Probe
  misc_feature 96, 97, 98, 99, 100, 101: n = A,T,C or G
gactggaagagcactgttcatttcatctccgcgaataacaacaactagttggaggctcatcgttcctattcaggcagatgttatcgaggtccgacnnnnnntcccgaaccaacgactacaaaactcgatcggatacgcatgaggct

SEQ ID NO: 4308 - DNA, 146 bp, Artificial Sequence
  Bisulfite Padlock Probe
  misc_feature 96, 97, 98, 99, 100, 101: n = A,T,C or G
gactggaagagcactgttcatttcatctccgcgaataacaacgactagttggaggctcatcgttcctattcaggcagatgttatcgaggtccgacnnnnnntcccgaaccaacgactacgaaactcgatcggatacgcatgaggct

SEQ ID NO: 4309 - DNA, 146 bp, Artificial Sequence
  Bisulfite Padlock Probe
  misc_feature 93, 94, 95, 96, 97, 98: n = A,T,C or G
gactggaagagcactgttcatttctaacctaaaccccaaatctcgttggaggctcatcgttcctattcaggcagatgttatcgaggtccgacnnnnnnctaaaaacaaaaaccacttatcctcattgatcggatacgcatgaggct

SEQ ID NO: 4310 - DNA, 146 bp, Artificial Sequence
  Bisulfite Padlock Probe
  misc_feature 93, 94, 95, 96, 97, 98: n = A,T,C or G
gactggaagagcactgttcatttctaacctaaaccccgaatctcgttggaggctcatcgttcctattcaggcagatgttatcgaggtccgacnnnnnnctaaaaacaaaaaccacttatcctcattgatcggatacgcatgaggct

SEQ ID NO: 4311 - DNA, 146 bp, Artificial Sequence
  Bisulfite Padlock Probe
  misc_feature 94, 95, 96, 97, 98, 99: n = A,T,C or G
gactggaagagcactgttcattttcccaaataaatattaaacaccgttggaggctcatcgttcctattcaggcagatgttatcgaggtccgacnnnnnnccactccgaaccgtttctcaactacaagatcggatacgcatgaggct

SEQ ID NO: 4312 - DNA, 146 bp, Artificial Sequence
  Bisulfite Padlock Probe
  misc_feature 94, 95, 96, 97, 98, 99: n = A,T,C or G
gactggaagagcactgttcattttcccaaataaatattaaacaccgttggaggctcatcgttcctattcaggcagatgttatcgaggtccgacnnnnnnccactccgaaccgtttctcgactacaagatcggatacgcatgaggct

SEQ ID NO: 4313 - DNA, 146 bp, Artificial Sequence
  Bisulfite Padlock Probe
  misc_feature 94, 95, 96, 97, 98, 99: n = A,T,C or G
gactggaagagcactgttccaaaaacaacaacaacaacaccaaccgttggaggctcatcgttcctattcaggcagatgttatcgaggtccgacnnnnnncaaccccaaatctctaccttaacaaccgatcggatacgcatgaggct

SEQ ID NO: 4314 - DNA, 146 bp, Artificial Sequence
  Bisulfite Padlock Probe
  misc_feature 94, 95, 96, 97, 98, 99: n = A,T,C or G
gactggaagagcactgttccaaaaacaacaacgacaacaccaaccgttggaggctcatcgttcctattcaggcagatgttatcgaggtccgacnnnnnncaaccccgaatctctaccttaacaaccgatcggatacgcatgaggct

SEQ ID NO: 4315 - DNA, 146 bp, Artificial Sequence
  Bisulfite Padlock Probe
  misc_feature 92, 93, 94, 95, 96, 97: n = A,T,C or G
gactggaagagcactgttccaaaaacgaaaataaaaacaaaaagttggaggctcatcgttcctattcaggcagatgttatcgaggtccgacnnnnnnaaaaacaaaacaaaccgcaacccttacccgatcggatacgcatgaggct

SEQ ID NO: 4316 - DNA, 146 bp, Artificial Sequence
  Bisulfite Padlock Probe
  misc_feature 92, 93, 94, 95, 96, 97: n = A,T,C or G
gactggaagagcactgttccaaaaacgaaaataaaaacgaaaagttggaggctcatcgttcctattcaggcagatgttatcgaggtccgacnnnnnnaaaaacaaaacaaaccgcgacccttacccgatcggatacgcatgaggct

SEQ ID NO: 4317 - DNA, 146 bp, Artificial Sequence
  Bisulfite Padlock Probe
  misc_feature 95, 96, 97, 98, 99, 100: n = A,T,C or G
gactggaagagcactgttccaaaaacgttcaaaataaaattctcccgttggaggctcatcgttcctattcaggcagatgttatcgaggtccgacnnnnnncccgaaaaacccgaaaaactaccaacgatcggatacgcatgaggct

SEQ ID NO: 4318 - DNA, 146 bp, Artificial Sequence
  Bisulfite Padlock Probe
  misc_feature 95, 96, 97, 98, 99, 100: n = A,T,C or G
gactggaagagcactgttccaaaaacgttcgaaataaaattctcccgttggaggctcatcgttcctattcaggcagatgttatcgaggtccgacnnnnnncccgaaaaacccgaaaaactaccgacgatcggatacgcatgaggct

SEQ ID NO: 4319 - DNA, 146 bp, Artificial Sequence
  Bisulfite Padlock Probe
  misc_feature 94, 95, 96, 97, 98, 99: n = A,T,C or G
gactggaagagcactgttccaaaaactaccgaccaaaatcccctcgttggaggctcatcgttcctattcaggcagatgttatcgaggtccgacnnnnnncttcaaaacgcgcaacgacaaatactcgatcggatacgcatgaggct

SEQ ID NO: 4320 - DNA, 146 bp, Artificial Sequence
  Bisulfite Padlock Probe
  misc_feature 94, 95, 96, 97, 98, 99: n = A,T,C or G
gactggaagagcactgttccaaaaactaccgaccgaaatcccctcgttggaggctcatcgttcctattcaggcagatgttatcgaggtccgacnnnnnncttcaaaacgcgcaacgacgaatactcgatcggatacgcatgaggct

SEQ ID NO: 4321 - DNA, 146 bp, Artificial Sequence
  Bisulfite Padlock Probe
  misc_feature 96, 97, 98, 99, 100, 101: n = A,T,C or G
gactggaagagcactgttccaaaacaaccactataaaataaataaaagttggaggctcatcgttcctattcaggcagatgttatcgaggtccgacnnnnnnaaaaataaataacgaaaaaccaaaagatcggatacgcatgaggct

SEQ ID NO: 4322 - DNA, 146 bp, Artificial Sequence
  Bisulfite Padlock Probe
  misc_feature 96, 97, 98, 99, 100, 101: n = A,T,C or G
gactggaagagcactgttccaaaacgaccactataaaataaataaaagttggaggctcatcgttcctattcaggcagatgttatcgaggtccgacnnnnnnaaaaataaataacgaaaaaccgaaagatcggatacgcatgaggct

SEQ ID NO: 4323 - DNA, 146 bp, Artificial Sequence
  Bisulfite Padlock Probe
  misc_feature 92, 93, 94, 95, 96, 97: n = A,T,C or G
gactggaagagcactgttccaaaactaaatttaaattttaaacgttggaggctcatcgttcctattcaggcagatgttatcgaggtccgacnnnnnnctctaaccttataatctaataaatatacagatcggatacgcatgaggct

SEQ ID NO: 4324 - DNA, 146 bp, Artificial Sequence
  Bisulfite Padlock Probe
  misc_feature 94, 95, 96, 97, 98, 99: n = A,T,C or G
gactggaagagcactgttccaaaattaaccaaatatacttaaaaagttggaggctcatcgttcctattcaggcagatgttatcgaggtccgacnnnnnnaaaaaccgaaccccgaaaataacaatagatcggatacgcatgaggct

SEQ ID NO: 4325 - DNA, 146 bp, Artificial Sequence
  Bisulfite Padlock Probe
  misc_feature 95, 96, 97, 98, 99, 100: n = A,T,C or G
gactggaagagcactgttccaaaattatcataacaacaactccatcgttggaggctcatcgttcctattcaggcagatgttatcgaggtccgacnnnnnncaaaaactacgacgataaccaaaaaagatcggatacgcatgaggct

SEQ ID NO: 4326 - DNA, 146 bp, Artificial Sequence
  Bisulfite Padlock Probe
  misc_feature 96, 97, 98, 99, 100, 101: n = A,T,C or G
gactggaagagcactgttccaaacatatatatatatctatatatatagttggaggctcatcgttcctattcaggcagatgttatcgaggtccgacnnnnnnaatcaaattttaacaaatactttccgatcggatacgcatgaggct

SEQ ID NO: 4327 - DNA, 146 bp, Artificial Sequence
  Bisulfite Padlock Probe
  misc_feature 92, 93, 94, 95, 96, 97: n = A,T,C or G
gactggaagagcactgttccaaaccaaaaacaatacaaacctcgttggaggctcatcgttcctattcaggcagatgttatcgaggtccgacnnnnnnaaaaatcgtcgaaaacaaaacccctaaaagatcggatacgcatgaggct

SEQ ID NO: 4328 - DNA, 146 bp, Artificial Sequence
  Bisulfite Padlock Probe
  misc_feature 94, 95, 96, 97, 98, 99: n = A,T,C or G
gactggaagagcactgttccaaaccataaaccgctcactactaacgttggaggctcatcgttcctattcaggcagatgttatcgaggtccgacnnnnnnaaaccctacaaaatctccaaaacacccgatcggatacgcatgaggct

SEQ ID NO: 4329 - DNA, 146 bp, Artificial Sequence
  Bisulfite Padlock Probe
  misc_feature 94, 95, 96, 97, 98, 99: n = A,T,C or G
gactggaagagcactgttccaaaccataaaccgctcgctactaacgttggaggctcatcgttcctattcaggcagatgttatcgaggtccgacnnnnnnaaaccctacgaaatctccaaaacacccgatcggatacgcatgaggct

SEQ ID NO: 4330 - DNA, 146 bp, Artificial Sequence
  Bisulfite Padlock Probe
  misc_feature 93, 94, 95, 96, 97, 98: n = A,T,C or G
gactggaagagcactgttccaaacccaatctaaacttactaaacgttggaggctcatcgttcctattcaggcagatgttatcgaggtccgacnnnnnnatcccgaaactctcaaaaatacaacccagatcggatacgcatgaggct

SEQ ID NO: 4331 - DNA, 146 bp, Artificial Sequence
  Bisulfite Padlock Probe
  misc_feature 93, 94, 95, 96, 97, 98: n = A,T,C or G
gactggaagagcactgttccaaacccaatctaaacttactaaacgttggaggctcatcgttcctattcaggcagatgttatcgaggtccgacnnnnnnatcccgaaactctcgaaaatacaacccagatcggatacgcatgaggct

SEQ ID NO: 4332 - DNA, 146 bp, Artificial Sequence
  Bisulfite Padlock Probe
  misc_feature 93, 94, 95, 96, 97, 98: n = A,T,C or G
gactggaagagcactgttccaaacctaacaaaaccaaaaacaccgttggaggctcatcgttcctattcaggcagatgttatcgaggtccgacnnnnnnaacatcctatcaaaacccatcccaactcgatcggatacgcatgaggct

SEQ ID NO: 4333 - DNA, 146 bp, Artificial Sequence
  Bisulfite Padlock Probe
  misc_feature 93, 94, 95, 96, 97, 98: n = A,T,C or G
gactggaagagcactgttccaaacctaacaaaaccaaaaacaccgttggaggctcatcgttcctattcaggcagatgttatcgaggtccgacnnnnnnaacatcctatcaaaacccatcccgactcgatcggatacgcatgaggct

SEQ ID NO: 4334 - DNA, 146 bp, Artificial Sequence
  Bisulfite Padlock Probe
  misc_feature 93, 94, 95, 96, 97, 98: n = A,T,C or G
gactggaagagcactgttccaaaccttatcaatacaacaaccccgttggaggctcatcgttcctattcaggcagatgttatcgaggtccgacnnnnnnaaaaatttttcaaactaaaccaacaaaagatcggatacgcatgaggct

SEQ ID NO: 4335 - DNA, 146 bp, Artificial Sequence
  Bisulfite Padlock Probe
  misc_feature 93, 94, 95, 96, 97, 98: n = A,T,C or G
gactggaagagcactgttccaaaccttatcgatacaacaaccccgttggaggctcatcgttcctattcaggcagatgttatcgaggtccgacnnnnnnaaaaatttttcgaactaaaccaacaaaagatcggatacgcatgaggct

SEQ ID NO: 4336 - DNA, 146 bp, Artificial Sequence
  Bisulfite Padlock Probe
  misc_feature 93, 94, 95, 96, 97, 98: n = A,T,C or G
gactggaagagcactgttccaaacgacgaaaacgcgaaccaaaagttggaggctcatcgttcctattcaggcagatgttatcgaggtccgacnnnnnnatcgacgaacaaaaacaaaaaataaaacgatcggatacgcatgaggct

SEQ ID NO: 4337 - DNA, 146 bp, Artificial Sequence
  Bisulfite Padlock Probe
  misc_feature 93, 94, 95, 96, 97, 98: n = A,T,C or G
gactggaagagcactgttccaaacgacgaaaacgcgaaccgaaagttggaggctcatcgttcctattcaggcagatgttatcgaggtccgacnnnnnnatcgacgaacaaaaacgaaaaataaaacgatcggatacgcatgaggct

SEQ ID NO: 4338 - DNA, 146 bp, Artificial Sequence
  Bisulfite Padlock Probe
  misc_feature 96, 97, 98, 99, 100, 101: n = A,T,C or G
gactggaagagcactgttccaaactccaaaactaccctctccaaaccgttggaggctcatcgttcctattcaggcagatgttatcgaggtccgacnnnnnnccccaaacctctccactccccaaaagatcggatacgcatgaggct

SEQ ID NO: 4339 - DNA, 146 bp, Artificial Sequence
  Bisulfite Padlock Probe
  misc_feature 96, 97, 98, 99, 100, 101: n = A,T,C or G
gactggaagagcactgttccaaactccgaaactaccctctccaaaccgttggaggctcatcgttcctattcaggcagatgttatcgaggtccgacnnnnnnccccaaacctctccactccccaaaagatcggatacgcatgaggct

SEQ ID NO: 4340 - DNA, 146 bp, Artificial Sequence
  Bisulfite Padlock Probe
  misc_feature 92, 93, 94, 95, 96, 97: n = A,T,C or G
gactggaagagcactgttccaaatacaccttaaaaactataaagttggaggctcatcgttcctattcaggcagatgttatcgaggtccgacnnnnnnaaaccaatataacctataaaccttttatcgatcggatacgcatgaggct

SEQ ID NO: 4341 - DNA, 146 bp, Artificial Sequence
  Bisulfite Padlock Probe
  misc_feature 92, 93, 94, 95, 96, 97: n = A,T,C or G
gactggaagagcactgttccaaatacgccttaaaaactataaagttggaggctcatcgttcctattcaggcagatgttatcgaggtccgacnnnnnnaaaccaatataacctataaaccttttatcgatcggatacgcatgaggct

SEQ ID NO: 4342 - DNA, 146 bp, Artificial Sequence
  Bisulfite Padlock Probe
  misc_feature 94, 95, 96, 97, 98, 99: n = A,T,C or G
gactggaagagcactgttccaaatataactaatattcaaaaaaccgttggaggctcatcgttcctattcaggcagatgttatcgaggtccgacnnnnnnctaataaattaaacaactacaattatcgatcggatacgcatgaggct

SEQ ID NO: 4343 - DNA, 146 bp, Artificial Sequence
  Bisulfite Padlock Probe
  misc_feature 94, 95, 96, 97, 98, 99: n = A,T,C or G
gactggaagagcactgttccaaatataactaatattcgaaaaaccgttggaggctcatcgttcctattcaggcagatgttatcgaggtccgacnnnnnnctaataaattaaacaactacaattatcgatcggatacgcatgaggct

SEQ ID NO: 4344 - DNA, 146 bp, Artificial Sequence
  Bisulfite Padlock Probe
  misc_feature 92, 93, 94, 95, 96, 97: n = A,T,C or G
gactggaagagcactgttccaaatatactaatcacccctcaatgttggaggctcatcgttcctattcaggcagatgttatcgaggtccgacnnnnnnaaaaataaaactaacccaaaatcccaaaagatcggatacgcatgaggct

SEQ ID NO: 4345 - DNA, 146 bp, Artificial Sequence
  Bisulfite Padlock Probe
  misc_feature 92, 93, 94, 95, 96, 97: n = A,T,C or G
gactggaagagcactgttccaaatatactaatcgcccctcaatgttggaggctcatcgttcctattcaggcagatgttatcgaggtccgacnnnnnnaaaaataaaactaacccaaaatcccaaaagatcggatacgcatgaggct

SEQ ID NO: 4346 - DNA, 146 bp, Artificial Sequence
  Bisulfite Padlock Probe
  misc_feature 92, 93, 94, 95, 96, 97: n = A,T,C or G
gactggaagagcactgttccaaatcgaacccaaaccacaatacgttggaggctcatcgttcctattcaggcagatgttatcgaggtccgacnnnnnncaatactaaactttttcaaacaaatacatgatcggatacgcatgaggct

SEQ ID NO: 4347 - DNA, 146 bp, Artificial Sequence
  Bisulfite Padlock Probe
  misc_feature 92, 93, 94, 95, 96, 97: n = A,T,C or G
gactggaagagcactgttccaaatcgaacccaaaccacgatacgttggaggctcatcgttcctattcaggcagatgttatcgaggtccgacnnnnnncaatactaaactttttcaaacaaatacatgatcggatacgcatgaggct

SEQ ID NO: 4348 - DNA, 146 bp, Artificial Sequence
  Bisulfite Padlock Probe
  misc_feature 94, 95, 96, 97, 98, 99: n = A,T,C or G
gactggaagagcactgttccaaatctaaaaataataatattcaaagttggaggctcatcgttcctattcaggcagatgttatcgaggtccgacnnnnnnaaaaacccacaaacccaacctttaatagatcggatacgcatgaggct

SEQ ID NO: 4349 - DNA, 146 bp, Artificial Sequence
  Bisulfite Padlock Probe
  misc_feature 94, 95, 96, 97, 98, 99: n = A,T,C or G
gactggaagagcactgttccaaatctaaaaataataatattcaaagttggaggctcatcgttcctattcaggcagatgttatcgaggtccgacnnnnnnaaaaacccacaaacccgacctttaatagatcggatacgcatgaggct

SEQ ID NO: 4350 - DNA, 146 bp, Artificial Sequence
  Bisulfite Padlock Probe
  misc_feature 93, 94, 95, 96, 97, 98: n = A,T,C or G
gactggaagagcactgttccaaattaccataatatcctaactacgttggaggctcatcgttcctattcaggcagatgttatcgaggtccgacnnnnnntactacaacgaccaatcccgaacataacgatcggatacgcatgaggct

SEQ ID NO: 4351 - DNA, 146 bp, Artificial Sequence
  Bisulfite Padlock Probe
  misc_feature 93, 94, 95, 96, 97, 98: n = A,T,C or G
gactggaagagcactgttccaaattaccgtaatatcctaactacgttggaggctcatcgttcctattcaggcagatgttatcgaggtccgacnnnnnntactacaacgaccaatcccgaacgtaacgatcggatacgcatgaggct

SEQ ID NO: 4352 - DNA, 146 bp, Artificial Sequence
  Bisulfite Padlock Probe
  misc_feature 94, 95, 96, 97, 98, 99: n = A,T,C or G
gactggaagagcactgttccaaattcttccccaaataaaacttatgttggaggctcatcgttcctattcaggcagatgttatcgaggtccgacnnnnnnactccataccccaaattactaaaaatagatcggatacgcatgaggct

SEQ ID NO: 4353 - DNA, 146 bp, Artificial Sequence
  Bisulfite Padlock Probe
  misc_feature 94, 95, 96, 97, 98, 99: n = A,T,C or G
gactggaagagcactgttccaaattcttccccgaataaaacttatgttggaggctcatcgttcctattcaggcagatgttatcgaggtccgacnnnnnnactccataccccgaattactaaaaatagatcggatacgcatgaggct

SEQ ID NO: 4354 - DNA, 146 bp, Artificial Sequence
  Bisulfite Padlock Probe
  misc_feature 93, 94, 95, 96, 97, 98: n = A,T,C or G
gactggaagagcactgttccaaatttaaatcttaaaattaaaaagttggaggctcatcgttcctattcaggcagatgttatcgaggtccgacnnnnnnaaacgaaccacgtttaatctccaaacccgatcggatacgcatgaggct

SEQ ID NO: 4355 - DNA, 146 bp, Artificial Sequence
  Bisulfite Padlock Probe
  misc_feature 92, 93, 94, 95, 96, 97: n = A,T,C or G
gactggaagagcactgttccaacaaaaactaacaaacccaaaagttggaggctcatcgttcctattcaggcagatgttatcgaggtccgacnnnnnnccctcaactacccctcaaaaaccattattgatcggatacgcatgaggct

SEQ ID NO: 4356 - DNA, 146 bp, Artificial Sequence
  Bisulfite Padlock Probe
  misc_feature 92, 93, 94, 95, 96, 97: n = A,T,C or G
gactggaagagcactgttccaacaaattaaaacacaaaacaacgttggaggctcatcgttcctattcaggcagatgttatcgaggtccgacnnnnnntcaacctaataataacacccttttccctagatcggatacgcatgaggct

SEQ ID NO: 4357 - DNA, 146 bp, Artificial Sequence
  Bisulfite Padlock Probe
  misc_feature 92, 93, 94, 95, 96, 97: n = A,T,C or G
gactggaagagcactgttccaacaaattaaaacgcaaaacaacgttggaggctcatcgttcctattcaggcagatgttatcgaggtccgacnnnnnntcaacctaataataacacccttttccctagatcggatacgcatgaggct

SEQ ID NO: 4358 - DNA, 146 bp, Artificial Sequence
  Bisulfite Padlock Probe
  misc_feature 94, 95, 96, 97, 98, 99: n = A,T,C or G
gactggaagagcactgttccaacaacaaaaacaacaacgaccaccgttggaggctcatcgttcctattcaggcagatgttatcgaggtccgacnnnnnnccgaactaaacgctaaaccaaactaacgatcggatacgcatgaggct

SEQ ID NO: 4359 - DNA, 146 bp, Artificial Sequence
  Bisulfite Padlock Probe
  misc_feature 94, 95, 96, 97, 98, 99: n = A,T,C or G
gactggaagagcactgttccaacaacaaaaacaacaacgaccgccgttggaggctcatcgttcctattcaggcagatgttatcgaggtccgacnnnnnnccgaactaaacgctaaaccgaactaacgatcggatacgcatgaggct

SEQ ID NO: 4360 - DNA, 146 bp, Artificial Sequence
  Bisulfite Padlock Probe
  misc_feature 93, 94, 95, 96, 97, 98: n = A,T,C or G
gactggaagagcactgttccaacaaccccataaccataaacaccgttggaggctcatcgttcctattcaggcagatgttatcgaggtccgacnnnnnncactcactccccctccccttaataaaaagatcggatacgcatgaggct

SEQ ID NO: 4361 - DNA, 146 bp, Artificial Sequence
  Bisulfite Padlock Probe
  misc_feature 93, 94, 95, 96, 97, 98: n = A,T,C or G
gactggaagagcactgttccaacaaccccataaccgtaaacaccgttggaggctcatcgttcctattcaggcagatgttatcgaggtccgacnnnnnncactcgctccccctccccttaataaaaagatcggatacgcatgaggct

SEQ ID NO: 4362 - DNA, 146 bp, Artificial Sequence
  Bisulfite Padlock Probe
  misc_feature 93, 94, 95, 96, 97, 98: n = A,T,C or G
gactggaagagcactgttccaacaacgactacctcaacccaaacgttggaggctcatcgttcctattcaggcagatgttatcgaggtccgacnnnnnnacaaaaactatccccaaaaaactaaaaagatcggatacgcatgaggct

SEQ ID NO: 4363 - DNA, 146 bp, Artificial Sequence
  Bisulfite Padlock Probe
  misc_feature 93, 94, 95, 96, 97, 98: n = A,T,C or G
gactggaagagcactgttccaacaacgactacctcgacccaaacgttggaggctcatcgttcctattcaggcagatgttatcgaggtccgacnnnnnnacaaaaactatccccgaaaaactaaaaagatcggatacgcatgaggct

SEQ ID NO: 4364 - DNA, 146 bp, Artificial Sequence
  Bisulfite Padlock Probe
  misc_feature 92, 93, 94, 95, 96, 97: n = A,T,C or G
gactggaagagcactgttccaacaacgtctcatccaaactaacgttggaggctcatcgttcctattcaggcagatgttatcgaggtccgacnnnnnnaaaatataatccaacaaatcgccaaattcgatcggatacgcatgaggct

SEQ ID NO: 4365 - DNA, 146 bp, Artificial Sequence
  Bisulfite Padlock Probe
  misc_feature 92, 93, 94, 95, 96, 97: n = A,T,C or G
gactggaagagcactgttccaacaacgtctcgtccaaactaacgttggaggctcatcgttcctattcaggcagatgttatcgaggtccgacnnnnnnaaaatataatccaacaaatcgccgaattcgatcggatacgcatgaggct

SEQ ID NO: 4366 - DNA, 146 bp, Artificial Sequence
  Bisulfite Padlock Probe
  misc_feature 96, 97, 98, 99, 100, 101: n = A,T,C or G
gactggaagagcactgttccaacaccccttcaaccttaaattcccacgttggaggctcatcgttcctattcaggcagatgttatcgaggtccgacnnnnnncaaaccttaacttcgcacctctctcgatcggatacgcatgaggct

SEQ ID NO: 4367 - DNA, 146 bp, Artificial Sequence
  Bisulfite Padlock Probe
  misc_feature 96, 97, 98, 99, 100, 101: n = A,T,C or G
gactggaagagcactgttccaacaccccttcaaccttaaattcccacgttggaggctcatcgttcctattcaggcagatgttatcgaggtccgacnnnnnncaaaccttaacttcgcgcctctctcgatcggatacgcatgaggct

SEQ ID NO: 4368 - DNA, 146 bp, Artificial Sequence
  Bisulfite Padlock Probe
  misc_feature 92, 93, 94, 95, 96, 97: n = A,T,C or G
gactggaagagcactgttccaacatctcccacctaaacatttagttggaggctcatcgttcctattcaggcagatgttatcgaggtccgacnnnnnncccttatcccaaatatcctccaaaacctagatcggatacgcatgaggct

SEQ ID NO: 4369 - DNA, 146 bp, Artificial Sequence
  Bisulfite Padlock Probe
  misc_feature 92, 93, 94, 95, 96, 97: n = A,T,C or G
gactggaagagcactgttccaaccaacctttaacaaaacaaccgttggaggctcatcgttcctattcaggcagatgttatcgaggtccgacnnnnnncctttatcttccaaacactctacaaaatagatcggatacgcatgaggct

SEQ ID NO: 4370 - DNA, 146 bp, Artificial Sequence
  Bisulfite Padlock Probe
  misc_feature 92, 93, 94, 95, 96, 97: n = A,T,C or G
gactggaagagcactgttccaaccaacctttaacaaaacaaccgttggaggctcatcgttcctattcaggcagatgttatcgaggtccgacnnnnnncctttatcttccaaacgctctacaaaatagatcggatacgcatgaggct

SEQ ID NO: 4371 - DNA, 146 bp, Artificial Sequence
  Bisulfite Padlock Probe
  misc_feature 95, 96, 97, 98, 99, 100: n = A,T,C or G
gactggaagagcactgttccaacccaaaaaacaacttaaaacataagttggaggctcatcgttcctattcaggcagatgttatcgaggtccgacnnnnnntatacgaaacgcaccttatcaaccccgatcggatacgcatgaggct

SEQ ID NO: 4372 - DNA, 146 bp, Artificial Sequence
  Bisulfite Padlock Probe
  misc_feature 95, 96, 97, 98, 99, 100: n = A,T,C or G
gactggaagagcactgttccaacccgaaaaacaacttaaaacataagttggaggctcatcgttcctattcaggcagatgttatcgaggtccgacnnnnnntatacgaaacgcaccttatcgaccccgatcggatacgcatgaggct

SEQ ID NO: 4373 - DNA, 146 bp, Artificial Sequence
  Bisulfite Padlock Probe
  misc_feature 95, 96, 97, 98, 99, 100: n = A,T,C or G
gactggaagagcactgttccaaccctacgataccgcctaaaacaacgttggaggctcatcgttcctattcaggcagatgttatcgaggtccgacnnnnnnaaaaacgaaacgactaaaccaaaaaagatcggatacgcatgaggct

SEQ ID NO: 4374 - DNA, 146 bp, Artificial Sequence
  Bisulfite Padlock Probe
  misc_feature 95, 96, 97, 98, 99, 100: n = A,T,C or G
gactggaagagcactgttccaaccctacgataccgcctaaaacgacgttggaggctcatcgttcctattcaggcagatgttatcgaggtccgacnnnnnnaaaaacgaaacgactaaaccgaaaaagatcggatacgcatgaggct

SEQ ID NO: 4375 - DNA, 146 bp, Artificial Sequence
  Bisulfite Padlock Probe
  misc_feature 96, 97, 98, 99, 100, 101: n = A,T,C or G
gactggaagagcactgttccaacgcccatcactacctctattaaaaagttggaggctcatcgttcctattcaggcagatgttatcgaggtccgacnnnnnntaaaacataactaacataataaaaagatcggatacgcatgaggct

SEQ ID NO: 4376 - DNA, 146 bp, Artificial Sequence
  Bisulfite Padlock Probe
  misc_feature 96, 97, 98, 99, 100, 101: n = A,T,C or G
gactggaagagcactgttccaacgcccatcgctacctctattaaaaagttggaggctcatcgttcctattcaggcagatgttatcgaggtccgacnnnnnntaaaacataactaacataataaaaagatcggatacgcatgaggct

SEQ ID NO: 4377 - DNA, 146 bp, Artificial Sequence
  Bisulfite Padlock Probe
  misc_feature 92, 93, 94, 95, 96, 97: n = A,T,C or G
gactggaagagcactgttccaacgtaaactatcgaccccaaccgttggaggctcatcgttcctattcaggcagatgttatcgaggtccgacnnnnnnccgaccataaaaacccctaaaatacactcgatcggatacgcatgaggct

SEQ ID NO: 4378 - DNA, 146 bp, Artificial Sequence
  Bisulfite Padlock Probe
  misc_feature 92, 93, 94, 95, 96, 97: n = A,T,C or G
gactggaagagcactgttccaacgtaaactatcgaccccgaccgttggaggctcatcgttcctattcaggcagatgttatcgaggtccgacnnnnnnccgaccgtaaaaacccctaaaatacactcgatcggatacgcatgaggct

SEQ ID NO: 4379 - DNA, 146 bp, Artificial Sequence
  Bisulfite Padlock Probe
  misc_feature 94, 95, 96, 97, 98, 99: n = A,T,C or G
gactggaagagcactgttccaactacaaacaaaacaactccctccgttggaggctcatcgttcctattcaggcagatgttatcgaggtccgacnnnnnnaacgaaaaccccaaaacactaaaaatcgatcggatacgcatgaggct

SEQ ID NO: 4380 - DNA, 146 bp, Artificial Sequence
  Bisulfite Padlock Probe
  misc_feature 92, 93, 94, 95, 96, 97: n = A,T,C or G
gactggaagagcactgttccaactacctacaaatccccaacctgttggaggctcatcgttcctattcaggcagatgttatcgaggtccgacnnnnnnctacctcaaatccctaataatacataacagatcggatacgcatgaggct

SEQ ID NO: 4381 - DNA, 146 bp, Artificial Sequence
  Bisulfite Padlock Probe
  misc_feature 92, 93, 94, 95, 96, 97: n = A,T,C or G
gactggaagagcactgttccaactacctacaaatccccgacctgttggaggctcatcgttcctattcaggcagatgttatcgaggtccgacnnnnnnctacctcaaatccctaataatacataacagatcggatacgcatgaggct

SEQ ID NO: 4382 - DNA, 146 bp, Artificial Sequence
  Bisulfite Padlock Probe
  misc_feature 94, 95, 96, 97, 98, 99: n = A,T,C or G
gactggaagagcactgttccaactacgaacaaaacaactccctccgttggaggctcatcgttcctattcaggcagatgttatcgaggtccgacnnnnnnaacgaaaaccccgaaacactaaaaatcgatcggatacgcatgaggct

SEQ ID NO: 4383 - DNA, 146 bp, Artificial Sequence
  Bisulfite Padlock Probe
  misc_feature 92, 93, 94, 95, 96, 97: n = A,T,C or G
gactggaagagcactgttccaactccctatccctactaaactagttggaggctcatcgttcctattcaggcagatgttatcgaggtccgacnnnnnnccccttttataaacaaaattccaaataccgatcggatacgcatgaggct

SEQ ID NO: 4384 - DNA, 146 bp, Artificial Sequence
  Bisulfite Padlock Probe
  misc_feature 93, 94, 95, 96, 97, 98: n = A,T,C or G
gactggaagagcactgttccaactcctaatcacaaaaactccccgttggaggctcatcgttcctattcaggcagatgttatcgaggtccgacnnnnnnaaacaacaaataaacttccaaaaatatcgatcggatacgcatgaggct

SEQ ID NO: 4385 - DNA, 146 bp, Artificial Sequence
  Bisulfite Padlock Probe
  misc_feature 95, 96, 97, 98, 99, 100: n = A,T,C or G
gactggaagagcactgttccaactcgccacccttcaataaaataccgttggaggctcatcgttcctattcaggcagatgttatcgaggtccgacnnnnnnaatttccgttccaccgaaacccaaacgatcggatacgcatgaggct

SEQ ID NO: 4386 - DNA, 146 bp, Artificial Sequence
  Bisulfite Padlock Probe
  misc_feature 95, 96, 97, 98, 99, 100: n = A,T,C or G
gactggaagagcactgttccaactcgccgcccttcaataaaataccgttggaggctcatcgttcctattcaggcagatgttatcgaggtccgacnnnnnnaatttccgttccaccgaaacccgaacgatcggatacgcatgaggct

SEQ ID NO: 4387 - DNA, 146 bp, Artificial Sequence
  Bisulfite Padlock Probe
  misc_feature 95, 96, 97, 98, 99, 100: n = A,T,C or G
gactggaagagcactgttccaactcgtcaccataactacccaaaccgttggaggctcatcgttcctattcaggcagatgttatcgaggtccgacnnnnnnatctcctcactactactcttataatcgatcggatacgcatgaggct

SEQ ID NO: 4388 - DNA, 146 bp, Artificial Sequence
  Bisulfite Padlock Probe
  misc_feature 95, 96, 97, 98, 99, 100: n = A,T,C or G
gactggaagagcactgttccaactcgtcgccataactacccaaaccgttggaggctcatcgttcctattcaggcagatgttatcgaggtccgacnnnnnnatctcctcgctactactcttataatcgatcggatacgcatgaggct

SEQ ID NO: 4389 - DNA, 146 bp, Artificial Sequence
  Bisulfite Padlock Probe
  misc_feature 92, 93, 94, 95, 96, 97: n = A,T,C or G
gactggaagagcactgttccaactctacaaaatcaaacccaacgttggaggctcatcgttcctattcaggcagatgttatcgaggtccgacnnnnnncaaacgttataccaaaaaccaaaattaccgatcggatacgcatgaggct

SEQ ID NO: 4390 - DNA, 146 bp, Artificial Sequence
  Bisulfite Padlock Probe
  misc_feature 92, 93, 94, 95, 96, 97: n = A,T,C or G
gactggaagagcactgttccaactctacaaaatcaaacccaacgttggaggctcatcgttcctattcaggcagatgttatcgaggtccgacnnnnnncaaacgttataccaaaaaccgaaattaccgatcggatacgcatgaggct

SEQ ID NO: 4391 - DNA, 146 bp, Artificial Sequence
  Bisulfite Padlock Probe
  misc_feature 92, 93, 94, 95, 96, 97: n = A,T,C or G
gactggaagagcactgttccaacttctacacaaactccaaaaagttggaggctcatcgttcctattcaggcagatgttatcgaggtccgacnnnnnnccctaaatacttttaattttacaactaaagatcggatacgcatgaggct

SEQ ID NO: 4392 - DNA, 146 bp, Artificial Sequence
  Bisulfite Padlock Probe
  misc_feature 92, 93, 94, 95, 96, 97: n = A,T,C or G
gactggaagagcactgttccaatacaatctataatctacccttgttggaggctcatcgttcctattcaggcagatgttatcgaggtccgacnnnnnnataccacaaataaactcaccaaaaacctagatcggatacgcatgaggct

SEQ ID NO: 4393 - DNA, 146 bp, Artificial Sequence
  Bisulfite Padlock Probe
  misc_feature 93, 94, 95, 96, 97, 98: n = A,T,C or G
gactggaagagcactgttccaatactattccatcccttccacccgttggaggctcatcgttcctattcaggcagatgttatcgaggtccgacnnnnnntaccaaaaacaacaacgcaaccaacaacgatcggatacgcatgaggct

SEQ ID NO: 4394 - DNA, 146 bp, Artificial Sequence
  Bisulfite Padlock Probe
  misc_feature 93, 94, 95, 96, 97, 98: n = A,T,C or G
gactggaagagcactgttccaatactattccatcccttccacccgttggaggctcatcgttcctattcaggcagatgttatcgaggtccgacnnnnnntaccaaaaacaacaacgcgaccaacaacgatcggatacgcatgaggct

SEQ ID NO: 4395 - DNA, 146 bp, Artificial Sequence
  Bisulfite Padlock Probe
  misc_feature 92, 93, 94, 95, 96, 97: n = A,T,C or G
gactggaagagcactgttccaatatctctatttatcctccaaagttggaggctcatcgttcctattcaggcagatgttatcgaggtccgacnnnnnnccccctaacaactcaaaatccaaattttagatcggatacgcatgaggct

SEQ ID NO: 4396 - DNA, 146 bp, Artificial Sequence
  Bisulfite Padlock Probe
  misc_feature 95, 96, 97, 98, 99, 100: n = A,T,C or G
gactggaagagcactgttccaattccaaactctcctacttctccacgttggaggctcatcgttcctattcaggcagatgttatcgaggtccgacnnnnnncaacccaccccgaaaaccaaaacaaagatcggatacgcatgaggct

SEQ ID NO: 4397 - DNA, 146 bp, Artificial Sequence
  Bisulfite Padlock Probe
  misc_feature 95, 96, 97, 98, 99, 100: n = A,T,C or G
gactggaagagcactgttccaattccaaactctcctacttctccacgttggaggctcatcgttcctattcaggcagatgttatcgaggtccgacnnnnnncaacccaccccgaaaaccaaaacgaagatcggatacgcatgaggct

SEQ ID NO: 4398 - DNA, 146 bp, Artificial Sequence
  Bisulfite Padlock Probe
  misc_feature 92, 93, 94, 95, 96, 97: n = A,T,C or G
gactggaagagcactgttccaatttacaaacctaaaacaaaaagttggaggctcatcgttcctattcaggcagatgttatcgaggtccgacnnnnnncaattattacaaaactaccctaccctcttgatcggatacgcatgaggct

SEQ ID NO: 4399 - DNA, 146 bp, Artificial Sequence
  Bisulfite Padlock Probe
  misc_feature 94, 95, 96, 97, 98, 99: n = A,T,C or G
gactggaagagcactgttccacaaactaaacaaaataaactaaccgttggaggctcatcgttcctattcaggcagatgttatcgaggtccgacnnnnnnaaccaaaaattcaacctccaaaacaacgatcggatacgcatgaggct

SEQ ID NO: 4400 - DNA, 146 bp, Artificial Sequence
  Bisulfite Padlock Probe
  misc_feature 94, 95, 96, 97, 98, 99: n = A,T,C or G
gactggaagagcactgttccacaaactaaacgaaataaactaaccgttggaggctcatcgttcctattcaggcagatgttatcgaggtccgacnnnnnnaaccaaaaattcgacctccaaaacaacgatcggatacgcatgaggct

SEQ ID NO: 4401 - DNA, 146 bp, Artificial Sequence
  Bisulfite Padlock Probe
  misc_feature 92, 93, 94, 95, 96, 97: n = A,T,C or G
gactggaagagcactgttccacaaatacttcctaaaaataaacgttggaggctcatcgttcctattcaggcagatgttatcgaggtccgacnnnnnnaaaaaccccacaaaaactaaaaacctaaagatcggatacgcatgaggct

SEQ ID NO: 4402 - DNA, 146 bp, Artificial Sequence
  Bisulfite Padlock Probe
  misc_feature 96, 97, 98, 99, 100, 101: n = A,T,C or G
gactggaagagcactgttccacaaccctaacaacaacgccataaaaagttggaggctcatcgttcctattcaggcagatgttatcgaggtccgacnnnnnncgacgcgaccaaaactcaaaatcccgatcggatacgcatgaggct

SEQ ID NO: 4403 - DNA, 146 bp, Artificial Sequence
  Bisulfite Padlock Probe
  misc_feature 96, 97, 98, 99, 100, 101: n = A,T,C or G
gactggaagagcactgttccacaaccctaacaacaacgccgtaaaaagttggaggctcatcgttcctattcaggcagatgttatcgaggtccgacnnnnnncgacgcgaccgaaactcaaaatcccgatcggatacgcatgaggct

SEQ ID NO: 4404 - DNA, 146 bp, Artificial Sequence
  Bisulfite Padlock Probe
  misc_feature 96, 97, 98, 99, 100, 101: n = A,T,C or G
gactggaagagcactgttccacacaacccaaatctacaatcactctcgttggaggctcatcgttcctattcaggcagatgttatcgaggtccgacnnnnnnccctcctaaccacccacaacctatagatcggatacgcatgaggct

SEQ ID NO: 4405 - DNA, 146 bp, Artificial Sequence
  Bisulfite Padlock Probe
  misc_feature 93, 94, 95, 96, 97, 98: n = A,T,C or G
gactggaagagcactgttccacatcacctatacaatatctacaagttggaggctcatcgttcctattcaggcagatgttatcgaggtccgacnnnnnnaaaaacccttcttattatctcactattcgatcggatacgcatgaggct

SEQ ID NO: 4406 - DNA, 146 bp, Artificial Sequence
  Bisulfite Padlock Probe
  misc_feature 93, 94, 95, 96, 97, 98: n = A,T,C or G
gactggaagagcactgttccacatcacctatacgatatctacaagttggaggctcatcgttcctattcaggcagatgttatcgaggtccgacnnnnnnaaaaacccttcttattatctcactattcgatcggatacgcatgaggct

SEQ ID NO: 4407 - DNA, 146 bp, Artificial Sequence
  Bisulfite Padlock Probe
  misc_feature 96, 97, 98, 99, 100, 101: n = A,T,C or G
gactggaagagcactgttccacatttaataaaaattttaaatcaaacgttggaggctcatcgttcctattcaggcagatgttatcgaggtccgacnnnnnnaaaccgaccgccaaacactattaccgatcggatacgcatgaggct

SEQ ID NO: 4408 - DNA, 146 bp, Artificial Sequence
  Bisulfite Padlock Probe
  misc_feature 96, 97, 98, 99, 100, 101: n = A,T,C or G
gactggaagagcactgttccacatttaataaaaattttaaatcaaacgttggaggctcatcgttcctattcaggcagatgttatcgaggtccgacnnnnnnaaaccgaccgccaaacgctattaccgatcggatacgcatgaggct

SEQ ID NO: 4409 - DNA, 146 bp, Artificial Sequence
  Bisulfite Padlock Probe
  misc_feature 94, 95, 96, 97, 98, 99: n = A,T,C or G
gactggaagagcactgttccaccaaacaacccaaattaaaaccccgttggaggctcatcgttcctattcaggcagatgttatcgaggtccgacnnnnnnaccctcgaaccaataatctcttttcccgatcggatacgcatgaggct

SEQ ID NO: 4410 - DNA, 146 bp, Artificial Sequence
  Bisulfite Padlock Probe
  misc_feature 93, 94, 95, 96, 97, 98: n = A,T,C or G
gactggaagagcactgttccaccaccaccacctaatcaacctacgttggaggctcatcgttcctattcaggcagatgttatcgaggtccgacnnnnnnaccgtcacaaaccccgacaaactataaagatcggatacgcatgaggct

SEQ ID NO: 4411 - DNA, 146 bp, Artificial Sequence
  Bisulfite Padlock Probe
  misc_feature 96, 97, 98, 99, 100, 101: n = A,T,C or G
gactggaagagcactgttccacccaaactaccctataaaaatactcagttggaggctcatcgttcctattcaggcagatgttatcgaggtccgacnnnnnnctccctcccccacaactcaacaatagatcggatacgcatgaggct

SEQ ID NO: 4412 - DNA, 146 bp, Artificial Sequence
  Bisulfite Padlock Probe
  misc_feature 96, 97, 98, 99, 100, 101: n = A,T,C or G
gactggaagagcactgttccacccaaactaccctataaaaatactcagttggaggctcatcgttcctattcaggcagatgttatcgaggtccgacnnnnnnctccctcccccacgactcaacaatagatcggatacgcatgaggct

SEQ ID NO: 4413 - DNA, 146 bp, Artificial Sequence
  Bisulfite Padlock Probe
  misc_feature 94, 95, 96, 97, 98, 99: n = A,T,C or G
gactggaagagcactgttccaccccacccaaattactacaacaacgttggaggctcatcgttcctattcaggcagatgttatcgaggtccgacnnnnnnattaaacataaaaataacctaacctttgatcggatacgcatgaggct

SEQ ID NO: 4414 - DNA, 146 bp, Artificial Sequence
  Bisulfite Padlock Probe
  misc_feature 94, 95, 96, 97, 98, 99: n = A,T,C or G
gactggaagagcactgttccaccccacccgaattactacaacaacgttggaggctcatcgttcctattcaggcagatgttatcgaggtccgacnnnnnnattaaacataaaaataacctaacctttgatcggatacgcatgaggct

SEQ ID NO: 4415 - DNA, 146 bp, Artificial Sequence
  Bisulfite Padlock Probe
  misc_feature 94, 95, 96, 97, 98, 99: n = A,T,C or G
gactggaagagcactgttccaccccgcaaacaactctaaaataacgttggaggctcatcgttcctattcaggcagatgttatcgaggtccgacnnnnnnccaccttatacctaatttccacaactcgatcggatacgcatgaggct

SEQ ID NO: 4416 - DNA, 146 bp, Artificial Sequence
  Bisulfite Padlock Probe
  misc_feature 94, 95, 96, 97, 98, 99: n = A,T,C or G
gactggaagagcactgttccaccccgcaaacgactctaaaataacgttggaggctcatcgttcctattcaggcagatgttatcgaggtccgacnnnnnnccaccttatacctaatttccacgactcgatcggatacgcatgaggct

SEQ ID NO: 4417 - DNA, 146 bp, Artificial Sequence
  Bisulfite Padlock Probe
  misc_feature 95, 96, 97, 98, 99, 100: n = A,T,C or G
gactggaagagcactgttccacccctccctaaaacccctttaaaacgttggaggctcatcgttcctattcaggcagatgttatcgaggtccgacnnnnnnacaataacaacaaaaactccaaactcgatcggatacgcatgaggct

SEQ ID NO: 4418 - DNA, 146 bp, Artificial Sequence
  Bisulfite Padlock Probe
  misc_feature 95, 96, 97, 98, 99, 100: n = A,T,C or G
gactggaagagcactgttccacccctccctaaaacccctttaaaacgttggaggctcatcgttcctattcaggcagatgttatcgaggtccgacnnnnnnacaataacaacaaaaactccgaactcgatcggatacgcatgaggct

SEQ ID NO: 4419 - DNA, 146 bp, Artificial Sequence
  Bisulfite Padlock Probe
  misc_feature 94, 95, 96, 97, 98, 99: n = A,T,C or G
gactggaagagcactgttccaccctaaaaaccctacaacccccacgttggaggctcatcgttcctattcaggcagatgttatcgaggtccgacnnnnnnaaaaataacaattccaacaaaaccctcgatcggatacgcatgaggct

SEQ ID NO: 4420 - DNA, 146 bp, Artificial Sequence
  Bisulfite Padlock Probe
  misc_feature 94, 95, 96, 97, 98, 99: n = A,T,C or G
gactggaagagcactgttccaccgaacaacccaaattaaaaccccgttggaggctcatcgttcctattcaggcagatgttatcgaggtccgacnnnnnnaccctcgaaccgataatctcttttcccgatcggatacgcatgaggct

SEQ ID NO: 4421 - DNA, 146 bp, Artificial Sequence
  Bisulfite Padlock Probe
  misc_feature 92, 93, 94, 95, 96, 97: n = A,T,C or G
gactggaagagcactgttccaccgactaccaacccacaaactagttggaggctcatcgttcctattcaggcagatgttatcgaggtccgacnnnnnncctacccgaacgccatctatacaaactacgatcggatacgcatgaggct

SEQ ID NO: 4422 - DNA, 146 bp, Artificial Sequence
  Bisulfite Padlock Probe
  misc_feature 92, 93, 94, 95, 96, 97: n = A,T,C or G
gactggaagagcactgttccaccgactaccaacccgcaaactagttggaggctcatcgttcctattcaggcagatgttatcgaggtccgacnnnnnncctacccgaacgccgtctatacaaactacgatcggatacgcatgaggct

SEQ ID NO: 4423 - DNA, 146 bp, Artificial Sequence
  Bisulfite Padlock Probe
  misc_feature 93, 94, 95, 96, 97, 98: n = A,T,C or G
gactggaagagcactgttccacctaaccatcacctccctaaaaagttggaggctcatcgttcctattcaggcagatgttatcgaggtccgacnnnnnnaactacactttccaaaacctacacaaccgatcggatacgcatgaggct

SEQ ID NO: 4424 - DNA, 146 bp, Artificial Sequence
  Bisulfite Padlock Probe
  misc_feature 93, 94, 95, 96, 97, 98: n = A,T,C or G
gactggaagagcactgttccacctaaccatcgcctccctaaaaagttggaggctcatcgttcctattcaggcagatgttatcgaggtccgacnnnnnnaactacactttccaaaacctacacaaccgatcggatacgcatgaggct

SEQ ID NO: 4425 - DNA, 146 bp, Artificial Sequence
  Bisulfite Padlock Probe
  misc_feature 92, 93, 94, 95, 96, 97: n = A,T,C or G
gactggaagagcactgttccacctaatttctttaacccaactcgttggaggctcatcgttcctattcaggcagatgttatcgaggtccgacnnnnnnaacaaaaatcactaaaccaccccaaaaccgatcggatacgcatgaggct

SEQ ID NO: 4426 - DNA, 146 bp, Artificial Sequence
  Bisulfite Padlock Probe
  misc_feature 95, 96, 97, 98, 99, 100: n = A,T,C or G
gactggaagagcactgttccacctaccccgactaccaaactctaacgttggaggctcatcgttcctattcaggcagatgttatcgaggtccgacnnnnnncgacgccgcacacatcttactaaaaagatcggatacgcatgaggct

SEQ ID NO: 4427 - DNA, 146 bp, Artificial Sequence
  Bisulfite Padlock Probe
  misc_feature 95, 96, 97, 98, 99, 100: n = A,T,C or G
gactggaagagcactgttccacctaccccgactaccgaactctaacgttggaggctcatcgttcctattcaggcagatgttatcgaggtccgacnnnnnncgacgccgcgcacatcttactaaaaagatcggatacgcatgaggct

SEQ ID NO: 4428 - DNA, 146 bp, Artificial Sequence
  Bisulfite Padlock Probe
  misc_feature 96, 97, 98, 99, 100, 101: n = A,T,C or G
gactggaagagcactgttccacctcccaaaaaccaactaactacctagttggaggctcatcgttcctattcaggcagatgttatcgaggtccgacnnnnnncgaaacgacccgaacccgaaaaacagatcggatacgcatgaggct

SEQ ID NO: 4429 - DNA, 146 bp, Artificial Sequence
  Bisulfite Padlock Probe
  misc_feature 96, 97, 98, 99, 100, 101: n = A,T,C or G
gactggaagagcactgttccacctcccgaaaaccaactaactacctagttggaggctcatcgttcctattcaggcagatgttatcgaggtccgacnnnnnncgaaacgacccgaacccgaaaaacggatcggatacgcatgaggct

SEQ ID NO: 4430 - DNA, 146 bp, Artificial Sequence
  Bisulfite Padlock Probe
  misc_feature 92, 93, 94, 95, 96, 97: n = A,T,C or G
gactggaagagcactgttccacctccctccaaactataaaaacgttggaggctcatcgttcctattcaggcagatgttatcgaggtccgacnnnnnnaatcttactccaaacttaacctcttcctcgatcggatacgcatgaggct

SEQ ID NO: 4431 - DNA, 146 bp, Artificial Sequence
  Bisulfite Padlock Probe
  misc_feature 92, 93, 94, 95, 96, 97: n = A,T,C or G
gactggaagagcactgttccacctccctccgaactataaaaacgttggaggctcatcgttcctattcaggcagatgttatcgaggtccgacnnnnnnaatcttactccaaacttaacctcttcctcgatcggatacgcatgaggct

SEQ ID NO: 4432 - DNA, 146 bp, Artificial Sequence
  Bisulfite Padlock Probe
  misc_feature 92, 93, 94, 95, 96, 97: n = A,T,C or G
gactggaagagcactgttccacgaaatctcgaaaaactacaacgttggaggctcatcgttcctattcaggcagatgttatcgaggtccgacnnnnnntaccctaaaacctcatctcccacaaccttgatcggatacgcatgaggct

SEQ ID NO: 4433 - DNA, 146 bp, Artificial Sequence
  Bisulfite Padlock Probe
  misc_feature 92, 93, 94, 95, 96, 97: n = A,T,C or G
gactggaagagcactgttccacgaaatctcgaaaaactacgacgttggaggctcatcgttcctattcaggcagatgttatcgaggtccgacnnnnnntaccctaaaacctcatctcccacgaccttgatcggatacgcatgaggct

SEQ ID NO: 4434 - DNA, 146 bp, Artificial Sequence
  Bisulfite Padlock Probe
  misc_feature 96, 97, 98, 99, 100, 101: n = A,T,C or G
gactggaagagcactgttccacgcaacccaaatctacaatcactctcgttggaggctcatcgttcctattcaggcagatgttatcgaggtccgacnnnnnnccctcctaaccgcccacaacctatagatcggatacgcatgaggct

SEQ ID NO: 4435 - DNA, 146 bp, Artificial Sequence
  Bisulfite Padlock Probe
  misc_feature 96, 97, 98, 99, 100, 101: n = A,T,C or G
gactggaagagcactgttccacgcgaattacaaccaaatactactacgttggaggctcatcgttcctattcaggcagatgttatcgaggtccgacnnnnnnaaaaacaactacccgacgcactaccgatcggatacgcatgaggct

SEQ ID NO: 4436 - DNA, 146 bp, Artificial Sequence
  Bisulfite Padlock Probe
  misc_feature 96, 97, 98, 99, 100, 101: n = A,T,C or G
gactggaagagcactgttccacgcgaattacgaccaaatactactacgttggaggctcatcgttcctattcaggcagatgttatcgaggtccgacnnnnnnaaaaacaactacccgacgcgctaccgatcggatacgcatgaggct

SEQ ID NO: 4437 - DNA, 146 bp, Artificial Sequence
  Bisulfite Padlock Probe
  misc_feature 93, 94, 95, 96, 97, 98: n = A,T,C or G
gactggaagagcactgttccacgcgaccgaaaaatctcaaaaaagttggaggctcatcgttcctattcaggcagatgttatcgaggtccgacnnnnnngactcgcaactcacgcaactactacaacgatcggatacgcatgaggct

SEQ ID NO: 4438 - DNA, 146 bp, Artificial Sequence
  Bisulfite Padlock Probe
  misc_feature 93, 94, 95, 96, 97, 98: n = A,T,C or G
gactggaagagcactgttccacgcgaccgaaaaatctcgaaaaagttggaggctcatcgttcctattcaggcagatgttatcgaggtccgacnnnnnngactcgcaactcacgcgactactacaacgatcggatacgcatgaggct

SEQ ID NO: 4439 - DNA, 146 bp, Artificial Sequence
  Bisulfite Padlock Probe
  misc_feature 96, 97, 98, 99, 100, 101: n = A,T,C or G
gactggaagagcactgttccactaaaacaacaaaataaaattcatacgttggaggctcatcgttcctattcaggcagatgttatcgaggtccgacnnnnnncacgaaacaaccaacgcaaccataagatcggatacgcatgaggct

SEQ ID NO: 4440 - DNA, 146 bp, Artificial Sequence
  Bisulfite Padlock Probe
  misc_feature 96, 97, 98, 99, 100, 101: n = A,T,C or G
gactggaagagcactgttccactaaaacaacaaaataaaattcgtacgttggaggctcatcgttcctattcaggcagatgttatcgaggtccgacnnnnnncacgaaacaaccaacgcgaccataagatcggatacgcatgaggct

SEQ ID NO: 4441 - DNA, 146 bp, Artificial Sequence
  Bisulfite Padlock Probe
  misc_feature 94, 95, 96, 97, 98, 99: n = A,T,C or G
gactggaagagcactgttccactatatcaaccctacaactaaaacgttggaggctcatcgttcctattcaggcagatgttatcgaggtccgacnnnnnnttcccaaaccaaaacttccccctcctcgatcggatacgcatgaggct

SEQ ID NO: 4442 - DNA, 146 bp, Artificial Sequence
  Bisulfite Padlock Probe
  misc_feature 94, 95, 96, 97, 98, 99: n = A,T,C or G
gactggaagagcactgttccactatatcaaccctacgactaaaacgttggaggctcatcgttcctattcaggcagatgttatcgaggtccgacnnnnnnttcccaaaccaaaacttccccctcctcgatcggatacgcatgaggct

SEQ ID NO: 4443 - DNA, 146 bp, Artificial Sequence
  Bisulfite Padlock Probe
  misc_feature 93, 94, 95, 96, 97, 98: n = A,T,C or G
gactggaagagcactgttccactcacccacgcactcattaacttgttggaggctcatcgttcctattcaggcagatgttatcgaggtccgacnnnnnnacactaaacgcaaattcgaacatccaccgatcggatacgcatgaggct

SEQ ID NO: 4444 - DNA, 146 bp, Artificial Sequence
  Bisulfite Padlock Probe
  misc_feature 93, 94, 95, 96, 97, 98: n = A,T,C or G
gactggaagagcactgttccactcacccacgcactcgttaacttgttggaggctcatcgttcctattcaggcagatgttatcgaggtccgacnnnnnnacactaaacgcaaattcgaacgtccaccgatcggatacgcatgaggct

SEQ ID NO: 4445 - DNA, 146 bp, Artificial Sequence
  Bisulfite Padlock Probe
  misc_feature 92, 93, 94, 95, 96, 97: n = A,T,C or G
gactggaagagcactgttccacttcactcaccacacatacaccgttggaggctcatcgttcctattcaggcagatgttatcgaggtccgacnnnnnnctccaataacccaacctaaacaaaaaacagatcggatacgcatgaggct

SEQ ID NO: 4446 - DNA, 146 bp, Artificial Sequence
  Bisulfite Padlock Probe
  misc_feature 92, 93, 94, 95, 96, 97: n = A,T,C or G
gactggaagagcactgttccacttcactcgccacacatacaccgttggaggctcatcgttcctattcaggcagatgttatcgaggtccgacnnnnnnctccaataacccaacctaaacgaaaaacagatcggatacgcatgaggct

SEQ ID NO: 4447 - DNA, 146 bp, Artificial Sequence
  Bisulfite Padlock Probe
  misc_feature 95, 96, 97, 98, 99, 100: n = A,T,C or G
gactggaagagcactgttccacttccattcacaatattttaacctcgttggaggctcatcgttcctattcaggcagatgttatcgaggtccgacnnnnnnaacaacttcaaacaaaaaatcttaacgatcggatacgcatgaggct

SEQ ID NO: 4448 - DNA, 146 bp, Artificial Sequence
  Bisulfite Padlock Probe
  misc_feature 95, 96, 97, 98, 99, 100: n = A,T,C or G
gactggaagagcactgttccacttccattcacaatattttaacctcgttggaggctcatcgttcctattcaggcagatgttatcgaggtccgacnnnnnnaacaacttcaaacgaaaaatcttaacgatcggatacgcatgaggct

SEQ ID NO: 4449 - DNA, 146 bp, Artificial Sequence
  Bisulfite Padlock Probe
  misc_feature 93, 94, 95, 96, 97, 98: n = A,T,C or G
gactggaagagcactgttccactttaaaaacactccctaactccgttggaggctcatcgttcctattcaggcagatgttatcgaggtccgacnnnnnnaatccgcaaaaaccccttaaacactaccgatcggatacgcatgaggct

SEQ ID NO: 4450 - DNA, 146 bp, Artificial Sequence
  Bisulfite Padlock Probe
  misc_feature 93, 94, 95, 96, 97, 98: n = A,T,C or G
gactggaagagcactgttccactttaaaaacactccctaactccgttggaggctcatcgttcctattcaggcagatgttatcgaggtccgacnnnnnnaatccgcaaaaaccccttaaacgctaccgatcggatacgcatgaggct

SEQ ID NO: 4451 - DNA, 146 bp, Artificial Sequence
  Bisulfite Padlock Probe
  misc_feature 92, 93, 94, 95, 96, 97: n = A,T,C or G
gactggaagagcactgttccataaaccctaaaccataccaaacgttggaggctcatcgttcctattcaggcagatgttatcgaggtccgacnnnnnnaaaatcaaaataaccaaaaactataacttgatcggatacgcatgaggct

SEQ ID NO: 4452 - DNA, 146 bp, Artificial Sequence
  Bisulfite Padlock Probe
  misc_feature 92, 93, 94, 95, 96, 97: n = A,T,C or G
gactggaagagcactgttccataacgatacgaccccaaaaaacgttggaggctcatcgttcctattcaggcagatgttatcgaggtccgacnnnnnntaaaataaacgaatccaccctcccaaaccgatcggatacgcatgaggct

SEQ ID NO: 4453 - DNA, 146 bp, Artificial Sequence
  Bisulfite Padlock Probe
  misc_feature 92, 93, 94, 95, 96, 97: n = A,T,C or G
gactggaagagcactgttccataacgatacgaccccgaaaaacgttggaggctcatcgttcctattcaggcagatgttatcgaggtccgacnnnnnntaaaataaacgaatccgccctcccaaaccgatcggatacgcatgaggct

SEQ ID NO: 4454 - DNA, 146 bp, Artificial Sequence
  Bisulfite Padlock Probe
  misc_feature 93, 94, 95, 96, 97, 98: n = A,T,C or G
gactggaagagcactgttccataacgttcgcgctactacaacccgttggaggctcatcgttcctattcaggcagatgttatcgaggtccgacnnnnnncattaaccgaacgaacacctccccattagatcggatacgcatgaggct

SEQ ID NO: 4455 - DNA, 146 bp, Artificial Sequence
  Bisulfite Padlock Probe
  misc_feature 93, 94, 95, 96, 97, 98: n = A,T,C or G
gactggaagagcactgttccataacgttcgcgctactacgacccgttggaggctcatcgttcctattcaggcagatgttatcgaggtccgacnnnnnncattaaccgaacgaacgcctccccattagatcggatacgcatgaggct

SEQ ID NO: 4456 - DNA, 146 bp, Artificial Sequence
  Bisulfite Padlock Probe
  misc_feature 92, 93, 94, 95, 96, 97: n = A,T,C or G
gactggaagagcactgttccataactatcacctacaactaaaagttggaggctcatcgttcctattcaggcagatgttatcgaggtccgacnnnnnncaaattaattaacttatacctcttattttgatcggatacgcatgaggct

SEQ ID NO: 4457 - DNA, 146 bp, Artificial Sequence
  Bisulfite Padlock Probe
  misc_feature 92, 93, 94, 95, 96, 97: n = A,T,C or G
gactggaagagcactgttccataactatcgcctacaactaaaagttggaggctcatcgttcctattcaggcagatgttatcgaggtccgacnnnnnncaaattaattaacttatacctcttattttgatcggatacgcatgaggct

SEQ ID NO: 4458 - DNA, 146 bp, Artificial Sequence
  Bisulfite Padlock Probe
  misc_feature 93, 94, 95, 96, 97, 98: n = A,T,C or G
gactggaagagcactgttccatactctcaacgtaacaaacaaccgttggaggctcatcgttcctattcaggcagatgttatcgaggtccgacnnnnnntaaacaactaaaataacctaacacaccagatcggatacgcatgaggct

SEQ ID NO: 4459 - DNA, 146 bp, Artificial Sequence
  Bisulfite Padlock Probe
  misc_feature 93, 94, 95, 96, 97, 98: n = A,T,C or G
gactggaagagcactgttccatactctcaacgtaacgaacaaccgttggaggctcatcgttcctattcaggcagatgttatcgaggtccgacnnnnnntaaacaactaaaataacctaacgcaccagatcggatacgcatgaggct

SEQ ID NO: 4460 - DNA, 146 bp, Artificial Sequence
  Bisulfite Padlock Probe
  misc_feature 92, 93, 94, 95, 96, 97: n = A,T,C or G
gactggaagagcactgttccatcaacttcctcctatccctcatgttggaggctcatcgttcctattcaggcagatgttatcgaggtccgacnnnnnnaaataaacttctactacctaaacaacttcgatcggatacgcatgaggct

SEQ ID NO: 4461 - DNA, 146 bp, Artificial Sequence
  Bisulfite Padlock Probe
  misc_feature 92, 93, 94, 95, 96, 97: n = A,T,C or G
gactggaagagcactgttccattaactataaaaccccaataaagttggaggctcatcgttcctattcaggcagatgttatcgaggtccgacnnnnnnctaccgaaaaacactacccaaacctaaacgatcggatacgcatgaggct

SEQ ID NO: 4462 - DNA, 146 bp, Artificial Sequence
  Bisulfite Padlock Probe
  misc_feature 92, 93, 94, 95, 96, 97: n = A,T,C or G
gactggaagagcactgttccattaactataaaaccccgataaagttggaggctcatcgttcctattcaggcagatgttatcgaggtccgacnnnnnnctaccgaaaaacgctacccaaacctaaacgatcggatacgcatgaggct

SEQ ID NO: 4463 - DNA, 146 bp, Artificial Sequence
  Bisulfite Padlock Probe
  misc_feature 93, 94, 95, 96, 97, 98: n = A,T,C or G
gactggaagagcactgttccattacctacaaactaaaacttcacgttggaggctcatcgttcctattcaggcagatgttatcgaggtccgacnnnnnnaaaaactaaaatactccatacctttcccgatcggatacgcatgaggct

SEQ ID NO: 4464 - DNA, 146 bp, Artificial Sequence
  Bisulfite Padlock Probe
  misc_feature 93, 94, 95, 96, 97, 98: n = A,T,C or G
gactggaagagcactgttccattacctacaaactaaaacttcgcgttggaggctcatcgttcctattcaggcagatgttatcgaggtccgacnnnnnnaaaaactaaaatactccatacctttcccgatcggatacgcatgaggct

SEQ ID NO: 4465 - DNA, 146 bp, Artificial Sequence
  Bisulfite Padlock Probe
  misc_feature 92, 93, 94, 95, 96, 97: n = A,T,C or G
gactggaagagcactgttccattacctttaaacgcaactctccgttggaggctcatcgttcctattcaggcagatgttatcgaggtccgacnnnnnnaaatttcttaataacaaacccctcactatgatcggatacgcatgaggct

SEQ ID NO: 4466 - DNA, 146 bp, Artificial Sequence
  Bisulfite Padlock Probe
  misc_feature 92, 93, 94, 95, 96, 97: n = A,T,C or G
gactggaagagcactgttccattacctttaaacgcgactctccgttggaggctcatcgttcctattcaggcagatgttatcgaggtccgacnnnnnnaaatttcttaataacaaacccctcactatgatcggatacgcatgaggct

SEQ ID NO: 4467 - DNA, 146 bp, Artificial Sequence
  Bisulfite Padlock Probe
  misc_feature 93, 94, 95, 96, 97, 98: n = A,T,C or G
gactggaagagcactgttccattactatctaataacaacttaaagttggaggctcatcgttcctattcaggcagatgttatcgaggtccgacnnnnnnaaaaatactcgcgaaaaacacctaaaaagatcggatacgcatgaggct

SEQ ID NO: 4468 - DNA, 146 bp, Artificial Sequence
  Bisulfite Padlock Probe
  misc_feature 92, 93, 94, 95, 96, 97: n = A,T,C or G
gactggaagagcactgttccattttccccttaattacataaccgttggaggctcatcgttcctattcaggcagatgttatcgaggtccgacnnnnnnaattttaacctaaaataacctaaactacagatcggatacgcatgaggct

SEQ ID NO: 4469 - DNA, 146 bp, Artificial Sequence
  Bisulfite Padlock Probe
  misc_feature 95, 96, 97, 98, 99, 100: n = A,T,C or G
gactggaagagcactgttccatttttcctaaccaacctatatccccgttggaggctcatcgttcctattcaggcagatgttatcgaggtccgacnnnnnnctcaaaaactaccccaaaatcaactcgatcggatacgcatgaggct

SEQ ID NO: 4470 - DNA, 146 bp, Artificial Sequence
  Bisulfite Padlock Probe
  misc_feature 95, 96, 97, 98, 99, 100: n = A,T,C or G
gactggaagagcactgttccatttttcctaaccgacctatatccccgttggaggctcatcgttcctattcaggcagatgttatcgaggtccgacnnnnnnctcaaaaactaccccgaaatcaactcgatcggatacgcatgaggct

SEQ ID NO: 4471 - DNA, 146 bp, Artificial Sequence
  Bisulfite Padlock Probe
  misc_feature 96, 97, 98, 99, 100, 101: n = A,T,C or G
gactggaagagcactgttcccaaaaacccaataaaaactactaaaaagttggaggctcatcgttcctattcaggcagatgttatcgaggtccgacnnnnnnaaaccaacgaaaacgcgcaaccaaagatcggatacgcatgaggct

SEQ ID NO: 4472 - DNA, 146 bp, Artificial Sequence
  Bisulfite Padlock Probe
  misc_feature 96, 97, 98, 99, 100, 101: n = A,T,C or G
gactggaagagcactgttcccaaaaacccgataaaaactactaaaaagttggaggctcatcgttcctattcaggcagatgttatcgaggtccgacnnnnnnaaaccaacgaaaacgcgcgaccaaagatcggatacgcatgaggct

SEQ ID NO: 4473 - DNA, 146 bp, Artificial Sequence
  Bisulfite Padlock Probe
  misc_feature 92, 93, 94, 95, 96, 97: n = A,T,C or G
gactggaagagcactgttcccaaaaatcacatctacccctcccgttggaggctcatcgttcctattcaggcagatgttatcgaggtccgacnnnnnntttccactcaataccataaaatttcaacagatcggatacgcatgaggct

SEQ ID NO: 4474 - DNA, 146 bp, Artificial Sequence
  Bisulfite Padlock Probe
  misc_feature 92, 93, 94, 95, 96, 97: n = A,T,C or G
gactggaagagcactgttcccaaaaatcgcatctacccctcccgttggaggctcatcgttcctattcaggcagatgttatcgaggtccgacnnnnnntttccactcaataccgtaaaatttcaacagatcggatacgcatgaggct

SEQ ID NO: 4475 - DNA, 146 bp, Artificial Sequence
  Bisulfite Padlock Probe
  misc_feature 92, 93, 94, 95, 96, 97: n = A,T,C or G
gactggaagagcactgttcccaaaacccgacatcctaaacctcgttggaggctcatcgttcctattcaggcagatgttatcgaggtccgacnnnnnnaactaccaaactaaccacacccaacttccgatcggatacgcatgaggct

SEQ ID NO: 4476 - DNA, 146 bp, Artificial Sequence
  Bisulfite Padlock Probe
  misc_feature 92, 93, 94, 95, 96, 97: n = A,T,C or G
gactggaagagcactgttcccaaaacccgacgtcctaaacctcgttggaggctcatcgttcctattcaggcagatgttatcgaggtccgacnnnnnnaactaccaaactaaccacgcccaacttccgatcggatacgcatgaggct

SEQ ID NO: 4477 - DNA, 146 bp, Artificial Sequence
  Bisulfite Padlock Probe
  misc_feature 92, 93, 94, 95, 96, 97: n = A,T,C or G
gactggaagagcactgttcccaaaacctttcaaacccacaaacgttggaggctcatcgttcctattcaggcagatgttatcgaggtccgacnnnnnnaaaaacaaaatataaaaactactctaattgatcggatacgcatgaggct

SEQ ID NO: 4478 - DNA, 146 bp, Artificial Sequence
  Bisulfite Padlock Probe
  misc_feature 92, 93, 94, 95, 96, 97: n = A,T,C or G
gactggaagagcactgttcccaaaccacaaaactaatacccccgttggaggctcatcgttcctattcaggcagatgttatcgaggtccgacnnnnnnaaaaatcactacacctaaacaattttcttgatcggatacgcatgaggct

SEQ ID NO: 4479 - DNA, 146 bp, Artificial Sequence
  Bisulfite Padlock Probe
  misc_feature 92, 93, 94, 95, 96, 97: n = A,T,C or G
gactggaagagcactgttcccaaaccgcaaaactaatacccccgttggaggctcatcgttcctattcaggcagatgttatcgaggtccgacnnnnnnaaaaatcactacgcctaaacaattttcttgatcggatacgcatgaggct

SEQ ID NO: 4480 - DNA, 146 bp, Artificial Sequence
  Bisulfite Padlock Probe
  misc_feature 96, 97, 98, 99, 100, 101: n = A,T,C or G
gactggaagagcactgttcccaaataacgcgtctaaaacaaactaacgttggaggctcatcgttcctattcaggcagatgttatcgaggtccgacnnnnnncccgacgtccgccaaattaaaaaccgatcggatacgcatgaggct

SEQ ID NO: 4481 - DNA, 146 bp, Artificial Sequence
  Bisulfite Padlock Probe
  misc_feature 96, 97, 98, 99, 100, 101: n = A,T,C or G
gactggaagagcactgttcccaaataacgcgtctaaaacgaactaacgttggaggctcatcgttcctattcaggcagatgttatcgaggtccgacnnnnnncccgacgtccgccgaattaaaaaccgatcggatacgcatgaggct

SEQ ID NO: 4482 - DNA, 146 bp, Artificial Sequence
  Bisulfite Padlock Probe
  misc_feature 92, 93, 94, 95, 96, 97: n = A,T,C or G
gactggaagagcactgttcccaaatccaaacctaaaacaaaaagttggaggctcatcgttcctattcaggcagatgttatcgaggtccgacnnnnnnacttaaaaaccaatccactacctcaacttgatcggatacgcatgaggct

SEQ ID NO: 4483 - DNA, 146 bp, Artificial Sequence
  Bisulfite Padlock Probe
  misc_feature 92, 93, 94, 95, 96, 97: n = A,T,C or G
gactggaagagcactgttcccaaatccgaacctaaaacaaaaagttggaggctcatcgttcctattcaggcagatgttatcgaggtccgacnnnnnnacttaaaaaccaatccgctacctcaacttgatcggatacgcatgaggct

SEQ ID NO: 4484 - DNA, 146 bp, Artificial Sequence
  Bisulfite Padlock Probe
  misc_feature 96, 97, 98, 99, 100, 101: n = A,T,C or G
gactggaagagcactgttcccaacatacaccctcaaccctaaaaaccgttggaggctcatcgttcctattcaggcagatgttatcgaggtccgacnnnnnntacccaaccctactaaccccctaccgatcggatacgcatgaggct

SEQ ID NO: 4485 - DNA, 146 bp, Artificial Sequence
  Bisulfite Padlock Probe
  misc_feature 96, 97, 98, 99, 100, 101: n = A,T,C or G
gactggaagagcactgttcccaacatacaccctcaaccctaaaaaccgttggaggctcatcgttcctattcaggcagatgttatcgaggtccgacnnnnnntacccgaccctactaaccccctaccgatcggatacgcatgaggct

SEQ ID NO: 4486 - DNA, 146 bp, Artificial Sequence
  Bisulfite Padlock Probe
  misc_feature 96, 97, 98, 99, 100, 101: n = A,T,C or G
gactggaagagcactgttcccaacccaaaactaaaatccgcaaactagttggaggctcatcgttcctattcaggcagatgttatcgaggtccgacnnnnnnaaaaatactccaaatcccacctcccgatcggatacgcatgaggct

SEQ ID NO: 4487 - DNA, 146 bp, Artificial Sequence
  Bisulfite Padlock Probe
  misc_feature 96, 97, 98, 99, 100, 101: n = A,T,C or G
gactggaagagcactgttcccaacccaaaactaaaatccgcgaactagttggaggctcatcgttcctattcaggcagatgttatcgaggtccgacnnnnnnaaaaatactccgaatcccacctcccgatcggatacgcatgaggct

SEQ ID NO: 4488 - DNA, 146 bp, Artificial Sequence
  Bisulfite Padlock Probe
  misc_feature 92, 93, 94, 95, 96, 97: n = A,T,C or G
gactggaagagcactgttcccaacctacacaacactcaaaatagttggaggctcatcgttcctattcaggcagatgttatcgaggtccgacnnnnnnttaaccacacctaactaatcacccctacagatcggatacgcatgaggct

SEQ ID NO: 4489 - DNA, 146 bp, Artificial Sequence
  Bisulfite Padlock Probe
  misc_feature 92, 93, 94, 95, 96, 97: n = A,T,C or G
gactggaagagcactgttcccaacctacacaacactcaaaatagttggaggctcatcgttcctattcaggcagatgttatcgaggtccgacnnnnnnttaaccacgcctaactaatcacccctacagatcggatacgcatgaggct

SEQ ID NO: 4490 - DNA, 146 bp, Artificial Sequence
  Bisulfite Padlock Probe
  misc_feature 94, 95, 96, 97, 98, 99: n = A,T,C or G
gactggaagagcactgttcccaacctatcccaaaaacctctaacagttggaggctcatcgttcctattcaggcagatgttatcgaggtccgacnnnnnncaaacaactccaactcaaataataaccgatcggatacgcatgaggct

SEQ ID NO: 4491 - DNA, 146 bp, Artificial Sequence
  Bisulfite Padlock Probe
  misc_feature 94, 95, 96, 97, 98, 99: n = A,T,C or G
gactggaagagcactgttcccaacctatcccgaaaacctctaacagttggaggctcatcgttcctattcaggcagatgttatcgaggtccgacnnnnnncaaacaactccaactcgaataataaccgatcggatacgcatgaggct

SEQ ID NO: 4492 - DNA, 146 bp, Artificial Sequence
  Bisulfite Padlock Probe
  misc_feature 92, 93, 94, 95, 96, 97: n = A,T,C or G
gactggaagagcactgttcccaacctccgaaccaaaaccaaacgttggaggctcatcgttcctattcaggcagatgttatcgaggtccgacnnnnnnaacgaaacaacccaaaaccaacccaaaaagatcggatacgcatgaggct

SEQ ID NO: 4493 - DNA, 146 bp, Artificial Sequence
  Bisulfite Padlock Probe
  misc_feature 92, 93, 94, 95, 96, 97: n = A,T,C or G
gactggaagagcactgttcccaacctccgaaccgaaaccaaacgttggaggctcatcgttcctattcaggcagatgttatcgaggtccgacnnnnnnaacgaaacaacccgaaaccaacccaaaaagatcggatacgcatgaggct

SEQ ID NO: 4494 - DNA, 146 bp, Artificial Sequence
  Bisulfite Padlock Probe
  misc_feature 92, 93, 94, 95, 96, 97: n = A,T,C or G
gactggaagagcactgttcccaactaaaactaaaacaaaaaccgttggaggctcatcgttcctattcaggcagatgttatcgaggtccgacnnnnnntaacaaaaacccttcaaccacctcctcccgatcggatacgcatgaggct

SEQ ID NO: 4495 - DNA, 146 bp, Artificial Sequence
  Bisulfite Padlock Probe
  misc_feature 96, 97, 98, 99, 100, 101: n = A,T,C or G
gactggaagagcactgttcccaactcctttccctctttaccaaaaaagttggaggctcatcgttcctattcaggcagatgttatcgaggtccgacnnnnnncaaacaaccgcgaaaacgacgacaagatcggatacgcatgaggct

SEQ ID NO: 4496 - DNA, 146 bp, Artificial Sequence
  Bisulfite Padlock Probe
  misc_feature 96, 97, 98, 99, 100, 101: n = A,T,C or G
gactggaagagcactgttcccaactcctttccctctttaccgaaaaagttggaggctcatcgttcctattcaggcagatgttatcgaggtccgacnnnnnncaaacaaccgcgaaaacgacgacgagatcggatacgcatgaggct

SEQ ID NO: 4497 - DNA, 146 bp, Artificial Sequence
  Bisulfite Padlock Probe
  misc_feature 92, 93, 94, 95, 96, 97: n = A,T,C or G
gactggaagagcactgttcccaatcctaaacgcaaaatacaacgttggaggctcatcgttcctattcaggcagatgttatcgaggtccgacnnnnnnaaccactcataaatttaaaccaacaaaaagatcggatacgcatgaggct

SEQ ID NO: 4498 - DNA, 146 bp, Artificial Sequence
  Bisulfite Padlock Probe
  misc_feature 92, 93, 94, 95, 96, 97: n = A,T,C or G
gactggaagagcactgttcccaatcctaaacgcgaaatacaacgttggaggctcatcgttcctattcaggcagatgttatcgaggtccgacnnnnnnaaccactcataaatttaaaccaacgaaaagatcggatacgcatgaggct

SEQ ID NO: 4499 - DNA, 146 bp, Artificial Sequence
  Bisulfite Padlock Probe
  misc_feature 92, 93, 94, 95, 96, 97: n = A,T,C or G
gactggaagagcactgttcccacaacaacccttcttctccttcgttggaggctcatcgttcctattcaggcagatgttatcgaggtccgacnnnnnnaaaaacaaaaacgcttcccaaaactctaagatcggatacgcatgaggct

SEQ ID NO: 4500 - DNA, 146 bp, Artificial Sequence
  Bisulfite Padlock Probe
  misc_feature 92, 93, 94, 95, 96, 97: n = A,T,C or G
gactggaagagcactgttcccacaacgacccttcttctccttcgttggaggctcatcgttcctattcaggcagatgttatcgaggtccgacnnnnnnaaaaacaaaaacgcttcccgaaactctaagatcggatacgcatgaggct

SEQ ID NO: 4501 - DNA, 146 bp, Artificial Sequence
  Bisulfite Padlock Probe
  misc_feature 95, 96, 97, 98, 99, 100: n = A,T,C or G
gactggaagagcactgttcccacatacccaacctactaaaccacacgttggaggctcatcgttcctattcaggcagatgttatcgaggtccgacnnnnnnttcgacccgaacctcccaaaataaccgatcggatacgcatgaggct

SEQ ID NO: 4502 - DNA, 146 bp, Artificial Sequence
  Bisulfite Padlock Probe
  misc_feature 95, 96, 97, 98, 99, 100: n = A,T,C or G
gactggaagagcactgttcccacccccaaaactaaccaataaaaacgttggaggctcatcgttcctattcaggcagatgttatcgaggtccgacnnnnnntaaaaactaaaactatcaaccaatccgatcggatacgcatgaggct

SEQ ID NO: 4503 - DNA, 146 bp, Artificial Sequence
  Bisulfite Padlock Probe
  misc_feature 95, 96, 97, 98, 99, 100: n = A,T,C or G
gactggaagagcactgttcccacccccgaaactaaccaataaaaacgttggaggctcatcgttcctattcaggcagatgttatcgaggtccgacnnnnnntaaaaactaaaactatcaaccaatccgatcggatacgcatgaggct

SEQ ID NO: 4504 - DNA, 146 bp, Artificial Sequence
  Bisulfite Padlock Probe
  misc_feature 95, 96, 97, 98, 99, 100: n = A,T,C or G
gactggaagagcactgttcccaccccctatcctacaaaaactacacgttggaggctcatcgttcctattcaggcagatgttatcgaggtccgacnnnnnnttactctacgcctccccaatactcccgatcggatacgcatgaggct

SEQ ID NO: 4505 - DNA, 146 bp, Artificial Sequence
  Bisulfite Padlock Probe
  misc_feature 92, 93, 94, 95, 96, 97: n = A,T,C or G
gactggaagagcactgttcccaccgaaaacgacatcaatctacgttggaggctcatcgttcctattcaggcagatgttatcgaggtccgacnnnnnnattaaaaataaaaacaaatctttctataagatcggatacgcatgaggct

SEQ ID NO: 4506 - DNA, 146 bp, Artificial Sequence
  Bisulfite Padlock Probe
  misc_feature 92, 93, 94, 95, 96, 97: n = A,T,C or G
gactggaagagcactgttcccaccgaaaacgacgtcaatctacgttggaggctcatcgttcctattcaggcagatgttatcgaggtccgacnnnnnnattaaaaataaaaacgaatctttctataagatcggatacgcatgaggct

SEQ ID NO: 4507 - DNA, 146 bp, Artificial Sequence
  Bisulfite Padlock Probe
  misc_feature 96, 97, 98, 99, 100, 101: n = A,T,C or G
gactggaagagcactgttcccaccgcgaactctatcaatacactaaagttggaggctcatcgttcctattcaggcagatgttatcgaggtccgacnnnnnngaaacaccgtacccaaacacacaccgatcggatacgcatgaggct

SEQ ID NO: 4508 - DNA, 146 bp, Artificial Sequence
  Bisulfite Padlock Probe
  misc_feature 96, 97, 98, 99, 100, 101: n = A,T,C or G
gactggaagagcactgttcccaccgcgaactctatcgatacactaaagttggaggctcatcgttcctattcaggcagatgttatcgaggtccgacnnnnnngaaacaccgtacccaaacacacgccgatcggatacgcatgaggct

SEQ ID NO: 4509 - DNA, 146 bp, Artificial Sequence
  Bisulfite Padlock Probe
  misc_feature 95, 96, 97, 98, 99, 100: n = A,T,C or G
gactggaagagcactgttcccacctaaaacccacctttactaaaaagttggaggctcatcgttcctattcaggcagatgttatcgaggtccgacnnnnnnttttcccgccttctacccacattttcgatcggatacgcatgaggct

SEQ ID NO: 4510 - DNA, 146 bp, Artificial Sequence
  Bisulfite Padlock Probe
  misc_feature 95, 96, 97, 98, 99, 100: n = A,T,C or G
gactggaagagcactgttcccacctaaaacccgcctttactaaaaagttggaggctcatcgttcctattcaggcagatgttatcgaggtccgacnnnnnnttttcccgccttctacccacgttttcgatcggatacgcatgaggct

SEQ ID NO: 4511 - DNA, 146 bp, Artificial Sequence
  Bisulfite Padlock Probe
  misc_feature 93, 94, 95, 96, 97, 98: n = A,T,C or G
gactggaagagcactgttcccactcccaaatttccctccatctcgttggaggctcatcgttcctattcaggcagatgttatcgaggtccgacnnnnnnaaaaacacaaacactaattttccaaaaagatcggatacgcatgaggct

SEQ ID NO: 4512 - DNA, 146 bp, Artificial Sequence
  Bisulfite Padlock Probe
  misc_feature 94, 95, 96, 97, 98, 99: n = A,T,C or G
gactggaagagcactgttcccataatcactctacaacccaactccgttggaggctcatcgttcctattcaggcagatgttatcgaggtccgacnnnnnnaccctcccaaaactactttattaaaaagatcggatacgcatgaggct

SEQ ID NO: 4513 - DNA, 146 bp, Artificial Sequence
  Bisulfite Padlock Probe
  misc_feature 94, 95, 96, 97, 98, 99: n = A,T,C or G
gactggaagagcactgttcccataatcgctctacaacccaactccgttggaggctcatcgttcctattcaggcagatgttatcgaggtccgacnnnnnnaccctcccaaaactactttattaaaaagatcggatacgcatgaggct

SEQ ID NO: 4514 - DNA, 146 bp, Artificial Sequence
  Bisulfite Padlock Probe
  misc_feature 92, 93, 94, 95, 96, 97: n = A,T,C or G
gactggaagagcactgttcccatactcctaacccaacaccaacgttggaggctcatcgttcctattcaggcagatgttatcgaggtccgacnnnnnntacaaaacacccgccaaccattatcattcgatcggatacgcatgaggct

SEQ ID NO: 4515 - DNA, 146 bp, Artificial Sequence
  Bisulfite Padlock Probe
  misc_feature 94, 95, 96, 97, 98, 99: n = A,T,C or G
gactggaagagcactgttcccatctaccttcaaaaccccaaacccgttggaggctcatcgttcctattcaggcagatgttatcgaggtccgacnnnnnncaccgaaaatacacaatacgcataaccgatcggatacgcatgaggct

SEQ ID NO: 4516 - DNA, 146 bp, Artificial Sequence
  Bisulfite Padlock Probe
  misc_feature 94, 95, 96, 97, 98, 99: n = A,T,C or G
gactggaagagcactgttcccatctaccttcgaaaccccaaacccgttggaggctcatcgttcctattcaggcagatgttatcgaggtccgacnnnnnncaccgaaaatacacaatacgcgtaaccgatcggatacgcatgaggct

SEQ ID NO: 4517 - DNA, 146 bp, Artificial Sequence
  Bisulfite Padlock Probe
  misc_feature 96, 97, 98, 99, 100, 101: n = A,T,C or G
gactggaagagcactgttcccattaactacgcgcacctttatataacgttggaggctcatcgttcctattcaggcagatgttatcgaggtccgacnnnnnnaccaaaaacccgcactaaactccacgatcggatacgcatgaggct

SEQ ID NO: 4518 - DNA, 146 bp, Artificial Sequence
  Bisulfite Padlock Probe
  misc_feature 96, 97, 98, 99, 100, 101: n = A,T,C or G
gactggaagagcactgttcccattaactacgcgcgcctttatataacgttggaggctcatcgttcctattcaggcagatgttatcgaggtccgacnnnnnnaccaaaaacccgcgctaaactccacgatcggatacgcatgaggct

SEQ ID NO: 4519 - DNA, 146 bp, Artificial Sequence
  Bisulfite Padlock Probe
  misc_feature 92, 93, 94, 95, 96, 97: n = A,T,C or G
gactggaagagcactgttccccaaaacctaaacttacaacaccgttggaggctcatcgttcctattcaggcagatgttatcgaggtccgacnnnnnnaaactctacaaccactaccctatacactcgatcggatacgcatgaggct

SEQ ID NO: 4520 - DNA, 146 bp, Artificial Sequence
  Bisulfite Padlock Probe
  misc_feature 92, 93, 94, 95, 96, 97: n = A,T,C or G
gactggaagagcactgttccccaaaacctaaacttacaacgccgttggaggctcatcgttcctattcaggcagatgttatcgaggtccgacnnnnnnaaactctacaaccactaccctatacgctcgatcggatacgcatgaggct

SEQ ID NO: 4521 - DNA, 146 bp, Artificial Sequence
  Bisulfite Padlock Probe
  misc_feature 92, 93, 94, 95, 96, 97: n = A,T,C or G
gactggaagagcactgttccccaaaacgtaccacctccctattgttggaggctcatcgttcctattcaggcagatgttatcgaggtccgacnnnnnnctaaatatataacgacgcgcaaatttaaagatcggatacgcatgaggct

SEQ ID NO: 4522 - DNA, 146 bp, Artificial Sequence
  Bisulfite Padlock Probe
  misc_feature 92, 93, 94, 95, 96, 97: n = A,T,C or G
gactggaagagcactgttccccaaaacgtaccgcctccctattgttggaggctcatcgttcctattcaggcagatgttatcgaggtccgacnnnnnnctaaatatataacgacgcgcgaatttaaagatcggatacgcatgaggct

SEQ ID NO: 4523 - DNA, 146 bp, Artificial Sequence
  Bisulfite Padlock Probe
  misc_feature 92, 93, 94, 95, 96, 97: n = A,T,C or G
gactggaagagcactgttccccaaaactacccaaatcccacaagttggaggctcatcgttcctattcaggcagatgttatcgaggtccgacnnnnnnctctccgaaatcactcccctaaaacactcgatcggatacgcatgaggct

SEQ ID NO: 4524 - DNA, 146 bp, Artificial Sequence
  Bisulfite Padlock Probe
  misc_feature 95, 96, 97, 98, 99, 100: n = A,T,C or G
gactggaagagcactgttccccaaacaaatacccaattattcattagttggaggctcatcgttcctattcaggcagatgttatcgaggtccgacnnnnnncaacaaacccgcaactatttcccctcgatcggatacgcatgaggct

SEQ ID NO: 4525 - DNA, 146 bp, Artificial Sequence
  Bisulfite Padlock Probe
  misc_feature 95, 96, 97, 98, 99, 100: n = A,T,C or G
gactggaagagcactgttccccaaacaaatacccgattattcattagttggaggctcatcgttcctattcaggcagatgttatcgaggtccgacnnnnnncaacaaacccgcgactatttcccctcgatcggatacgcatgaggct

SEQ ID NO: 4526 - DNA, 146 bp, Artificial Sequence
  Bisulfite Padlock Probe
  misc_feature 94, 95, 96, 97, 98, 99: n = A,T,C or G
gactggaagagcactgttccccaaaccaaacccaatccatactacgttggaggctcatcgttcctattcaggcagatgttatcgaggtccgacnnnnnnacgaccataacattcaaaataaccaaagatcggatacgcatgaggct

SEQ ID NO: 4527 - DNA, 146 bp, Artificial Sequence
  Bisulfite Padlock Probe
  misc_feature 94, 95, 96, 97, 98, 99: n = A,T,C or G
gactggaagagcactgttccccaaaccaaacccaatccgtactacgttggaggctcatcgttcctattcaggcagatgttatcgaggtccgacnnnnnnacgaccataacattcgaaataaccaaagatcggatacgcatgaggct

SEQ ID NO: 4528 - DNA, 146 bp, Artificial Sequence
  Bisulfite Padlock Probe
  misc_feature 95, 96, 97, 98, 99, 100: n = A,T,C or G
gactggaagagcactgttccccaaaccctctctacctacacaactcgttggaggctcatcgttcctattcaggcagatgttatcgaggtccgacnnnnnnaactaaaattcccaaacaaaacctaagatcggatacgcatgaggct

SEQ ID NO: 4529 - DNA, 146 bp, Artificial Sequence
  Bisulfite Padlock Probe
  misc_feature 92, 93, 94, 95, 96, 97: n = A,T,C or G
gactggaagagcactgttccccaaataccctcctaccccctacgttggaggctcatcgttcctattcaggcagatgttatcgaggtccgacnnnnnncaaactttctaaacaaacatccctaaaatgatcggatacgcatgaggct

SEQ ID NO: 4530 - DNA, 146 bp, Artificial Sequence
  Bisulfite Padlock Probe
  misc_feature 92, 93, 94, 95, 96, 97: n = A,T,C or G
gactggaagagcactgttccccaaatctcccccactaaaataagttggaggctcatcgttcctattcaggcagatgttatcgaggtccgacnnnnnnccccaaaatacaaacccacccctatcctcgatcggatacgcatgaggct

SEQ ID NO: 4531 - DNA, 146 bp, Artificial Sequence
  Bisulfite Padlock Probe
  misc_feature 93, 94, 95, 96, 97, 98: n = A,T,C or G
gactggaagagcactgttccccaacacctaaaatactcaaaaacgttggaggctcatcgttcctattcaggcagatgttatcgaggtccgacnnnnnnacacaaatcttaaaaacctccaaaacaagatcggatacgcatgaggct

SEQ ID NO: 4532 - DNA, 146 bp, Artificial Sequence
  Bisulfite Padlock Probe
  misc_feature 92, 93, 94, 95, 96, 97: n = A,T,C or G
gactggaagagcactgttccccaacccccaaaacttaacctccgttggaggctcatcgttcctattcaggcagatgttatcgaggtccgacnnnnnntcttaaaaaccaaaaatacaataaaacttgatcggatacgcatgaggct

SEQ ID NO: 4533 - DNA, 146 bp, Artificial Sequence
  Bisulfite Padlock Probe
  misc_feature 92, 93, 94, 95, 96, 97: n = A,T,C or G
gactggaagagcactgttccccaacccccgaaacttaacctccgttggaggctcatcgttcctattcaggcagatgttatcgaggtccgacnnnnnntcttaaaaaccgaaaatacaataaaacttgatcggatacgcatgaggct

SEQ ID NO: 4534 - DNA, 146 bp, Artificial Sequence
  Bisulfite Padlock Probe
  misc_feature 93, 94, 95, 96, 97, 98: n = A,T,C or G
gactggaagagcactgttccccaacgcctaaaatactcaaaaacgttggaggctcatcgttcctattcaggcagatgttatcgaggtccgacnnnnnnacacaaatcttaaaaacctccaaaacaagatcggatacgcatgaggct

SEQ ID NO: 4535 - DNA, 146 bp, Artificial Sequence
  Bisulfite Padlock Probe
  misc_feature 92, 93, 94, 95, 96, 97: n = A,T,C or G
gactggaagagcactgttccccaactcaccctaacccctcatcgttggaggctcatcgttcctattcaggcagatgttatcgaggtccgacnnnnnnaacgaaacccgaaataaacgccaaaaaacgatcggatacgcatgaggct

SEQ ID NO: 4536 - DNA, 146 bp, Artificial Sequence
  Bisulfite Padlock Probe
  misc_feature 92, 93, 94, 95, 96, 97: n = A,T,C or G
gactggaagagcactgttccccaactcaccctaacccctcatcgttggaggctcatcgttcctattcaggcagatgttatcgaggtccgacnnnnnnaacgaaacccgaaataaacgccgaaaaacgatcggatacgcatgaggct

SEQ ID NO: 4537 - DNA, 146 bp, Artificial Sequence
  Bisulfite Padlock Probe
  misc_feature 94, 95, 96, 97, 98, 99: n = A,T,C or G
gactggaagagcactgttccccacctcaactataactcctccaacgttggaggctcatcgttcctattcaggcagatgttatcgaggtccgacnnnnnncaaaatctccaaccctaaccaaaccccgatcggatacgcatgaggct

SEQ ID NO: 4538 - DNA, 146 bp, Artificial Sequence
  Bisulfite Padlock Probe
  misc_feature 94, 95, 96, 97, 98, 99: n = A,T,C or G
gactggaagagcactgttccccacctcaactataactcctccgacgttggaggctcatcgttcctattcaggcagatgttatcgaggtccgacnnnnnncaaaatctccaaccctaaccgaaccccgatcggatacgcatgaggct

SEQ ID NO: 4539 - DNA, 146 bp, Artificial Sequence
  Bisulfite Padlock Probe
  misc_feature 92, 93, 94, 95, 96, 97: n = A,T,C or G
gactggaagagcactgttccccacctcctaccctctctctatcgttggaggctcatcgttcctattcaggcagatgttatcgaggtccgacnnnnnnaaccacttcccaaacaaaccactaccatcgatcggatacgcatgaggct

SEQ ID NO: 4540 - DNA, 146 bp, Artificial Sequence
  Bisulfite Padlock Probe
  misc_feature 92, 93, 94, 95, 96, 97: n = A,T,C or G
gactggaagagcactgttccccacgacgcaaacatcctaaaaagttggaggctcatcgttcctattcaggcagatgttatcgaggtccgacnnnnnncacatctacccaaataaaatcaaataatcgatcggatacgcatgaggct

SEQ ID NO: 4541 - DNA, 146 bp, Artificial Sequence
  Bisulfite Padlock Probe
  misc_feature 92, 93, 94, 95, 96, 97: n = A,T,C or G
gactggaagagcactgttccccacgacgcgaacatcctaaaaagttggaggctcatcgttcctattcaggcagatgttatcgaggtccgacnnnnnncacatctacccaaataaaatcaaataatcgatcggatacgcatgaggct

SEQ ID NO: 4542 - DNA, 146 bp, Artificial Sequence
  Bisulfite Padlock Probe
  misc_feature 93, 94, 95, 96, 97, 98: n = A,T,C or G
gactggaagagcactgttccccataaaccacgaaaacccaatacgttggaggctcatcgttcctattcaggcagatgttatcgaggtccgacnnnnnnaaaaaccaatacttacgaaaacaaccccgatcggatacgcatgaggct

SEQ ID NO: 4543 - DNA, 146 bp, Artificial Sequence
  Bisulfite Padlock Probe
  misc_feature 93, 94, 95, 96, 97, 98: n = A,T,C or G
gactggaagagcactgttccccataaaccacgaaaacccgatacgttggaggctcatcgttcctattcaggcagatgttatcgaggtccgacnnnnnnaaaaaccaatacttacgaaaacgaccccgatcggatacgcatgaggct

SEQ ID NO: 4544 - DNA, 146 bp, Artificial Sequence
  Bisulfite Padlock Probe
  misc_feature 94, 95, 96, 97, 98, 99: n = A,T,C or G
gactggaagagcactgttccccataaataattaacccttcctaacgttggaggctcatcgttcctattcaggcagatgttatcgaggtccgacnnnnnntttctccccctaactacaaccccaatcgatcggatacgcatgaggct

SEQ ID NO: 4545 - DNA, 146 bp, Artificial Sequence
  Bisulfite Padlock Probe
  misc_feature 92, 93, 94, 95, 96, 97: n = A,T,C or G
gactggaagagcactgttccccataaatataacaaccccaaatgttggaggctcatcgttcctattcaggcagatgttatcgaggtccgacnnnnnnacacacacaaaccaaaactcttaaaaacagatcggatacgcatgaggct

SEQ ID NO: 4546 - DNA, 146 bp, Artificial Sequence
  Bisulfite Padlock Probe
  misc_feature 94, 95, 96, 97, 98, 99: n = A,T,C or G
gactggaagagcactgttccccatttctaaacattcatatttaacgttggaggctcatcgttcctattcaggcagatgttatcgaggtccgacnnnnnnctaccaaaacaacccctaaacaaccccgatcggatacgcatgaggct

SEQ ID NO: 4547 - DNA, 146 bp, Artificial Sequence
  Bisulfite Padlock Probe
  misc_feature 94, 95, 96, 97, 98, 99: n = A,T,C or G
gactggaagagcactgttccccatttctaaacattcatatttaacgttggaggctcatcgttcctattcaggcagatgttatcgaggtccgacnnnnnnctaccgaaacaacccctaaacaaccccgatcggatacgcatgaggct

SEQ ID NO: 4548 - DNA, 146 bp, Artificial Sequence
  Bisulfite Padlock Probe
  misc_feature 92, 93, 94, 95, 96, 97: n = A,T,C or G
gactggaagagcactgttcccccaaaaacgccctacaaaactcgttggaggctcatcgttcctattcaggcagatgttatcgaggtccgacnnnnnncaaatcaccgcataaacaactaatacaacgatcggatacgcatgaggct

SEQ ID NO: 4549 - DNA, 146 bp, Artificial Sequence
  Bisulfite Padlock Probe
  misc_feature 92, 93, 94, 95, 96, 97: n = A,T,C or G
gactggaagagcactgttcccccaaaaacgccctacgaaactcgttggaggctcatcgttcctattcaggcagatgttatcgaggtccgacnnnnnncaaatcaccgcgtaaacaactaatacaacgatcggatacgcatgaggct

SEQ ID NO: 4550 - DNA, 146 bp, Artificial Sequence
  Bisulfite Padlock Probe
  misc_feature 94, 95, 96, 97, 98, 99: n = A,T,C or G
gactggaagagcactgttcccccaaataaacaacaacccaaactcgttggaggctcatcgttcctattcaggcagatgttatcgaggtccgacnnnnnnaaaaacacaacaaccccaaacaaaaccgatcggatacgcatgaggct

SEQ ID NO: 4551 - DNA, 146 bp, Artificial Sequence
  Bisulfite Padlock Probe
  misc_feature 94, 95, 96, 97, 98, 99: n = A,T,C or G
gactggaagagcactgttcccccaaataaacaacaacccgaactcgttggaggctcatcgttcctattcaggcagatgttatcgaggtccgacnnnnnnaaaaacacaacaaccccaaacgaaaccgatcggatacgcatgaggct

SEQ ID NO: 4552 - DNA, 146 bp, Artificial Sequence
  Bisulfite Padlock Probe
  misc_feature 92, 93, 94, 95, 96, 97: n = A,T,C or G
gactggaagagcactgttcccccacctcctaatttttattcaagttggaggctcatcgttcctattcaggcagatgttatcgaggtccgacnnnnnnaaaatttaaacataatatataatataatagatcggatacgcatgaggct

SEQ ID NO: 4553 - DNA, 146 bp, Artificial Sequence
  Bisulfite Padlock Probe
  misc_feature 92, 93, 94, 95, 96, 97: n = A,T,C or G
gactggaagagcactgttcccccacctcctaatttttattcaagttggaggctcatcgttcctattcaggcagatgttatcgaggtccgacnnnnnnaaaatttaaacgtaatatataatataatagatcggatacgcatgaggct

SEQ ID NO: 4554 - DNA, 146 bp, Artificial Sequence
  Bisulfite Padlock Probe
  misc_feature 95, 96, 97, 98, 99, 100: n = A,T,C or G
gactggaagagcactgttcccccactattattattcctaaaaacacgttggaggctcatcgttcctattcaggcagatgttatcgaggtccgacnnnnnnttatcctccaaaaaccacacaaaaacgatcggatacgcatgaggct

SEQ ID NO: 4555 - DNA, 146 bp, Artificial Sequence; identical to SEQ ID NO: 4554
  Bisulfite Padlock Probe
  misc_feature 95, 96, 97, 98, 99, 100: n = A,T,C or G

SEQ ID NO: 4556 - DNA, 146 bp, Artificial Sequence
  Bisulfite Padlock Probe
  misc_feature 95, 96, 97, 98, 99, 100: n = A,T,C or G
gactggaagagcactgttcccccactattattattcctaaaaacacgttggaggctcatcgttcctattcaggcagatgttatcgaggtccgacnnnnnnttatcctccaaaaaccgcacaaaaacgatcggatacgcatgaggct

SEQ ID NO: 4557 - DNA, 146 bp, Artificial Sequence; identical to SEQ ID NO: 4556
  Bisulfite Padlock Probe
  misc_feature 95, 96, 97, 98, 99, 100: n = A,T,C or G

SEQ ID NO: 4558 - DNA, 146 bp, Artificial Sequence
  Bisulfite Padlock Probe
  misc_feature 94, 95, 96, 97, 98, 99: n = A,T,C or G
gactggaagagcactgttcccccataacccaacatccactaaaccgttggaggctcatcgttcctattcaggcagatgttatcgaggtccgacnnnnnnaaactttatacgaaaaacacctctaccgatcggatacgcatgaggct

SEQ ID NO: 4559 - DNA, 146 bp, Artificial Sequence
  Bisulfite Padlock Probe
  misc_feature 94, 95, 96, 97, 98, 99: n = A,T,C or G
gactggaagagcactgttcccccataacccgacatccactaaaccgttggaggctcatcgttcctattcaggcagatgttatcgaggtccgacnnnnnnaaactttatacgaaaaacgcctctaccgatcggatacgcatgaggct

SEQ ID NO: 4560 - DNA, 146 bp, Artificial Sequence
  Bisulfite Padlock Probe
  misc_feature 92, 93, 94, 95, 96, 97: n = A,T,C or G
gactggaagagcactgttcccccgaactccgcaacactaaaatgttggaggctcatcgttcctattcaggcagatgttatcgaggtccgacnnnnnnaaaaactaataacccaaacccgcaccttcgatcggatacgcatgaggct

SEQ ID NO: 4561 - DNA, 146 bp, Artificial Sequence
  Bisulfite Padlock Probe
  misc_feature 92, 93, 94, 95, 96, 97: n = A,T,C or G
gactggaagagcactgttcccccgaactccgcgacactaaaatgttggaggctcatcgttcctattcaggcagatgttatcgaggtccgacnnnnnnaaaaactaataacccaaacccgcgccttcgatcggatacgcatgaggct

SEQ ID NO: 4562 - DNA, 146 bp, Artificial Sequence
  Bisulfite Padlock Probe
  misc_feature 95, 96, 97, 98, 99, 100: n = A,T,C or G
gactggaagagcactgttcccccgaatacgaaaataaatacacaccgttggaggctcatcgttcctattcaggcagatgttatcgaggtccgacnnnnnnaaaacacctcgcaacttcacaacatcgatcggatacgcatgaggct

SEQ ID NO: 4563 - DNA, 146 bp, Artificial Sequence
  Bisulfite Padlock Probe
  misc_feature 95, 96, 97, 98, 99, 100: n = A,T,C or G
gactggaagagcactgttcccccgaatacgaaaataaatacgcaccgttggaggctcatcgttcctattcaggcagatgttatcgaggtccgacnnnnnnaaaacacctcgcgacttcacaacatcgatcggatacgcatgaggct

SEQ ID NO: 4564 - DNA, 146 bp, Artificial Sequence
  Bisulfite Padlock Probe
  misc_feature 94, 95, 96, 97, 98, 99: n = A,T,C or G
gactggaagagcactgttcccccgacgaaaataccaaactaaaaagttggaggctcatcgttcctattcaggcagatgttatcgaggtccgacnnnnnncgaaaacgaaaaacccaaccttctcccgatcggatacgcatgaggct

SEQ ID NO: 4565 - DNA, 146 bp, Artificial Sequence
  Bisulfite Padlock Probe
  misc_feature 94, 95, 96, 97, 98, 99: n = A,T,C or G
gactggaagagcactgttcccccgacgaaaataccgaactaaaaagttggaggctcatcgttcctattcaggcagatgttatcgaggtccgacnnnnnncgaaaacgaaaaacccgaccttctcccgatcggatacgcatgaggct

SEQ ID NO: 4566 - DNA, 146 bp, Artificial Sequence
  Bisulfite Padlock Probe
  misc_feature 92, 93, 94, 95, 96, 97: n = A,T,C or G
gactggaagagcactgttccccctaataaaatttctactatacgttggaggctcatcgttcctattcaggcagatgttatcgaggtccgacnnnnnntcctctacgacaacaactaattaaataccgatcggatacgcatgaggct

SEQ ID NO: 4567 - DNA, 146 bp, Artificial Sequence
  Bisulfite Padlock Probe
  misc_feature 92, 93, 94, 95, 96, 97: n = A,T,C or G
gactggaagagcactgttccccctaataaaatttctactatacgttggaggctcatcgttcctattcaggcagatgttatcgaggtccgacnnnnnntcctctacgacaacgactaattaaataccgatcggatacgcatgaggct

SEQ ID NO: 4568 - DNA, 146 bp, Artificial Sequence
  Bisulfite Padlock Probe
  misc_feature 92, 93, 94, 95, 96, 97: n = A,T,C or G
gactggaagagcactgttccccctccgtcccaacaactaaaacgttggaggctcatcgttcctattcaggcagatgttatcgaggtccgacnnnnnncacgaaaacaaacaaccaacaaatcaacagatcggatacgcatgaggct

SEQ ID NO: 4569 - DNA, 146 bp, Artificial Sequence
  Bisulfite Padlock Probe
  misc_feature 92, 93, 94, 95, 96, 97: n = A,T,C or G
gactggaagagcactgttccccctccgtcccgacaactaaaacgttggaggctcatcgttcctattcaggcagatgttatcgaggtccgacnnnnnncacgaaaacgaacaaccaacaaatcaacagatcggatacgcatgaggct

SEQ ID NO: 4570 - DNA, 146 bp, Artificial Sequence
  Bisulfite Padlock Probe
  misc_feature 95, 96, 97, 98, 99, 100: n = A,T,C or G
gactggaagagcactgttccccgaaaacaataaaaactacaaaaacgttggaggctcatcgttcctattcaggcagatgttatcgaggtccgacnnnnnnaaaaaccataaacgataaacaataccgatcggatacgcatgaggct

SEQ ID NO: 4571 - DNA, 146 bp, Artificial Sequence
  Bisulfite Padlock Probe
  misc_feature 95, 96, 97, 98, 99, 100: n = A,T,C or G
gactggaagagcactgttccccgaaaacgataaaaactacaaaaacgttggaggctcatcgttcctattcaggcagatgttatcgaggtccgacnnnnnnaaaaaccataaacgataaacgataccgatcggatacgcatgaggct

SEQ ID NO: 4572 - DNA, 146 bp, Artificial Sequence
  Bisulfite Padlock Probe
  misc_feature 95, 96, 97, 98, 99, 100: n = A,T,C or G
gactggaagagcactgttccccgaaacccgaaacaaaaactttacagttggaggctcatcgttcctattcaggcagatgttatcgaggtccgacnnnnnnccctcccgaaaatcgacgacaaaaaagatcggatacgcatgaggct

SEQ ID NO: 4573 - DNA, 146 bp, Artificial Sequence
  Bisulfite Padlock Probe
  misc_feature 95, 96, 97, 98, 99, 100: n = A,T,C or G
gactggaagagcactgttccccgaaacccgaaacgaaaactttacagttggaggctcatcgttcctattcaggcagatgttatcgaggtccgacnnnnnnccctcccgaaaatcgacgacgaaaaagatcggatacgcatgaggct

SEQ ID NO: 4574 - DNA, 146 bp, Artificial Sequence
  Bisulfite Padlock Probe
  misc_feature 92, 93, 94, 95, 96, 97: n = A,T,C or G
gactggaagagcactgttccccgaaactacccaaatcccacaagttggaggctcatcgttcctattcaggcagatgttatcgaggtccgacnnnnnnctctccgaaatcactcccctaaaacgctcgatcggatacgcatgaggct

SEQ ID NO: 4575 - DNA, 146 bp, Artificial Sequence
  Bisulfite Padlock Probe
  misc_feature 93, 94, 95, 96, 97, 98: n = A,T,C or G
gactggaagagcactgttccccgaacccaccaaaaacctaaaaagttggaggctcatcgttcctattcaggcagatgttatcgaggtccgacnnnnnnaaaaacccgtctccaactcccaaaatccgatcggatacgcatgaggct

SEQ ID NO: 4576 - DNA, 146 bp, Artificial Sequence
  Bisulfite Padlock Probe
  misc_feature 93, 94, 95, 96, 97, 98: n = A,T,C or G
gactggaagagcactgttccccgaacccgccaaaaacctaaaaagttggaggctcatcgttcctattcaggcagatgttatcgaggtccgacnnnnnnaaaaacccgtctccaactcccgaaatccgatcggatacgcatgaggct

SEQ ID NO: 4577 - DNA, 146 bp, Artificial Sequence
  Bisulfite Padlock Probe
  misc_feature 95, 96, 97, 98, 99, 100: n = A,T,C or G
gactggaagagcactgttccccgaaccctctctacctacacaactcgttggaggctcatcgttcctattcaggcagatgttatcgaggtccgacnnnnnnaactaaaattcccgaacaaaacctaagatcggatacgcatgaggct

SEQ ID NO: 4578 - DNA, 146 bp, Artificial Sequence
  Bisulfite Padlock Probe
  misc_feature 92, 93, 94, 95, 96, 97: n = A,T,C or G
gactggaagagcactgttccccgaataccctcctaccccctacgttggaggctcatcgttcctattcaggcagatgttatcgaggtccgacnnnnnncaaactttctaaacaaacatccctaaaatgatcggatacgcatgaggct

SEQ ID NO: 4579 - DNA, 146 bp, Artificial Sequence
  Bisulfite Padlock Probe
  misc_feature 95, 96, 97, 98, 99, 100: n = A,T,C or G
gactggaagagcactgttccccgacaactcaaccaaaaacttaaaagttggaggctcatcgttcctattcaggcagatgttatcgaggtccgacnnnnnnttcttcttcccatccttatccaaaacgatcggatacgcatgaggct

SEQ ID NO: 4580 - DNA, 146 bp, Artificial Sequence
  Bisulfite Padlock Probe
  misc_feature 92, 93, 94, 95, 96, 97: n = A,T,C or G
gactggaagagcactgttccccgacaactccaccgacaaatacgttggaggctcatcgttcctattcaggcagatgttatcgaggtccgacnnnnnnaatcctaaacgaaacaaaataaataaaacgatcggatacgcatgaggct

SEQ ID NO: 4581 - DNA, 146 bp, Artificial Sequence
  Bisulfite Padlock Probe
  misc_feature 92, 93, 94, 95, 96, 97: n = A,T,C or G
gactggaagagcactgttccccgacaactccaccgacgaatacgttggaggctcatcgttcctattcaggcagatgttatcgaggtccgacnnnnnnaatcctaaacgaaacgaaataaataaaacgatcggatacgcatgaggct

SEQ ID NO: 4582 - DNA, 146 bp, Artificial Sequence
  Bisulfite Padlock Probe
  misc_feature 95, 96, 97, 98, 99, 100: n = A,T,C or G
gactggaagagcactgttccccgacaactcgaccaaaaacttaaaagttggaggctcatcgttcctattcaggcagatgttatcgaggtccgacnnnnnnttcttcttcccgtccttatccaaaacgatcggatacgcatgaggct

SEQ ID NO: 4583 - DNA, 146 bp, Artificial Sequence
  Bisulfite Padlock Probe
  misc_feature 93, 94, 95, 96, 97, 98: n = A,T,C or G
gactggaagagcactgttccccgacgaccgaaacgtaaatacaagttggaggctcatcgttcctattcaggcagatgttatcgaggtccgacnnnnnnaaaaacgacctcccgaacgacaaaacaagatcggatacgcatgaggct

SEQ ID NO: 4584 - DNA, 146 bp, Artificial Sequence
  Bisulfite Padlock Probe
  misc_feature 93, 94, 95, 96, 97, 98: n = A,T,C or G
gactggaagagcactgttccccgacgaccgaaacgtaaatacgagttggaggctcatcgttcctattcaggcagatgttatcgaggtccgacnnnnnnaaaaacgacctcccgaacgacgaaacaagatcggatacgcatgaggct

SEQ ID NO: 4585 - DNA, 146 bp, Artificial Sequence
  Bisulfite Padlock Probe
  misc_feature 92, 93, 94, 95, 96, 97: n = A,T,C or G
gactggaagagcactgttccccgccacattccaaaaacttaaagttggaggctcatcgttcctattcaggcagatgttatcgaggtccgacnnnnnnattataaatacgaaatcaaaatttacattgatcggatacgcatgaggct

SEQ ID NO: 4586 - DNA, 146 bp, Artificial Sequence
  Bisulfite Padlock Probe
  misc_feature 92, 93, 94, 95, 96, 97: n = A,T,C or G
gactggaagagcactgttccccgccacgttccaaaaacttaaagttggaggctcatcgttcctattcaggcagatgttatcgaggtccgacnnnnnnattataaatacgaaatcgaaatttacattgatcggatacgcatgaggct

SEQ ID NO: 4587 - DNA, 146 bp, Artificial Sequence
  Bisulfite Padlock Probe
  misc_feature 92, 93, 94, 95, 96, 97: n = A,T,C or G
gactggaagagcactgttccccgcctcctaccctctctctatcgttggaggctcatcgttcctattcaggcagatgttatcgaggtccgacnnnnnnaaccacttcccaaacaaaccactaccatcgatcggatacgcatgaggct

SEQ ID NO: 4588 - DNA, 146 bp, Artificial Sequence
  Bisulfite Padlock Probe
  misc_feature 92, 93, 94, 95, 96, 97: n = A,T,C or G
gactggaagagcactgttccccgtcacataaacccaaataaacgttggaggctcatcgttcctattcaggcagatgttatcgaggtccgacnnnnnncatactaccgctaccgctactacatctccgatcggatacgcatgaggct

SEQ ID NO: 4589 - DNA, 146 bp, Artificial Sequence
  Bisulfite Padlock Probe
  misc_feature 92, 93, 94, 95, 96, 97: n = A,T,C or G
gactggaagagcactgttccccgtcacgtaaacccaaataaacgttggaggctcatcgttcctattcaggcagatgttatcgaggtccgacnnnnnncatactaccgctaccgctactacgtctccgatcggatacgcatgaggct

SEQ ID NO: 4590 - DNA, 146 bp, Artificial Sequence
  Bisulfite Padlock Probe
  misc_feature 92, 93, 94, 95, 96, 97: n = A,T,C or G
gactggaagagcactgttcccctaaaccctcactccataaaaagttggaggctcatcgttcctattcaggcagatgttatcgaggtccgacnnnnnnacaaaaactaactacttaaaatacaacccgatcggatacgcatgaggct

SEQ ID NO: 4591 - DNA, 146 bp, Artificial Sequence
  Bisulfite Padlock Probe
  misc_feature 92, 93, 94, 95, 96, 97: n = A,T,C or G
gactggaagagcactgttcccctaacccctccctacccaaaaagttggaggctcatcgttcctattcaggcagatgttatcgaggtccgacnnnnnnaaaaactcaaaccgacacgaaacttatcagatcggatacgcatgaggct

SEQ ID NO: 4592 - DNA, 146 bp, Artificial Sequence
  Bisulfite Padlock Probe
  misc_feature 92, 93, 94, 95, 96, 97: n = A,T,C or G
gactggaagagcactgttcccctaacccctccctacccaaaaagttggaggctcatcgttcctattcaggcagatgttatcgaggtccgacnnnnnnaaaaactcaaaccgacacgaaacttatcggatcggatacgcatgaggct

SEQ ID NO: 4593 - DNA, 146 bp, Artificial Sequence
  Bisulfite Padlock Probe
  misc_feature 95, 96, 97, 98, 99, 100: n = A,T,C or G
gactggaagagcactgttcccctaactactaatccacaaactccccgttggaggctcatcgttcctattcaggcagatgttatcgaggtccgacnnnnnnacccaaacccctccctaaataaataagatcggatacgcatgaggct

SEQ ID NO: 4594 - DNA, 146 bp, Artificial Sequence
  Bisulfite Padlock Probe
  misc_feature 94, 95, 96, 97, 98, 99: n = A,T,C or G
gactggaagagcactgttcccctaactcatctccccatctcacccgttggaggctcatcgttcctattcaggcagatgttatcgaggtccgacnnnnnnaaatttcgtcgaaaccaaacaaaatccgatcggatacgcatgaggct

SEQ ID NO: 4595 - DNA, 146 bp, Artificial Sequence
  Bisulfite Padlock Probe
  misc_feature 94, 95, 96, 97, 98, 99: n = A,T,C or G
gactggaagagcactgttcccctaactcatctccccatctcacccgttggaggctcatcgttcctattcaggcagatgttatcgaggtccgacnnnnnnaaatttcgtcgaaaccgaacaaaatccgatcggatacgcatgaggct

SEQ ID NO: 4596 - DNA, 146 bp, Artificial Sequence
  Bisulfite Padlock Probe
  misc_feature 92, 93, 94, 95, 96, 97: n = A,T,C or G
gactggaagagcactgttcccctcctaaaaaccatcaaataccgttggaggctcatcgttcctattcaggcagatgttatcgaggtccgacnnnnnnctttctccgcgcaatacctacaaaactccgatcggatacgcatgaggct

SEQ ID NO: 4597 - DNA, 146 bp, Artificial Sequence
  Bisulfite Padlock Probe
  misc_feature 92, 93, 94, 95, 96, 97: n = A,T,C or G
gactggaagagcactgttcccctcctaaaaaccatcaaataccgttggaggctcatcgttcctattcaggcagatgttatcgaggtccgacnnnnnnctttctccgcgcgatacctacaaaactccgatcggatacgcatgaggct

SEQ ID NO: 4598 - DNA, 146 bp, Artificial Sequence
  Bisulfite Padlock Probe
  misc_feature 96, 97, 98, 99, 100, 101: n = A,T,C or G
gactggaagagcactgttcccctctaacccgaaattacaactaaaacgttggaggctcatcgttcctattcaggcagatgttatcgaggtccgacnnnnnncgatacgcgcgaaaataacgacaacgatcggatacgcatgaggct

SEQ ID NO: 4599 - DNA, 146 bp, Artificial Sequence
  Bisulfite Padlock Probe
  misc_feature 96, 97, 98, 99, 100, 101: n = A,T,C or G
gactggaagagcactgttcccctctaacccgaaattacgactaaaacgttggaggctcatcgttcctattcaggcagatgttatcgaggtccgacnnnnnncgatacgcgcgaaaataacgacgacgatcggatacgcatgaggct

SEQ ID NO: 4600 - DNA, 146 bp, Artificial Sequence
  Bisulfite Padlock Probe
  misc_feature 92, 93, 94, 95, 96, 97: n = A,T,C or G
gactggaagagcactgttcccctctaaccgaaaacaacaaaacgttggaggctcatcgttcctattcaggcagatgttatcgaggtccgacnnnnnnaaaaactaaccaaccaatcctcaaccctagatcggatacgcatgaggct

SEQ ID NO: 4601 - DNA, 146 bp, Artificial Sequence
  Bisulfite Padlock Probe
  misc_feature 92, 93, 94, 95, 96, 97: n = A,T,C or G
gactggaagagcactgttcccctctaaccgaaaacaacgaaacgttggaggctcatcgttcctattcaggcagatgttatcgaggtccgacnnnnnnaaaaactaaccgaccaatcctcaaccctagatcggatacgcatgaggct

SEQ ID NO: 4602 - DNA, 146 bp, Artificial Sequence
  Bisulfite Padlock Probe
  misc_feature 92, 93, 94, 95, 96, 97: n = A,T,C or G
gactggaagagcactgttcccctcttctccaccttctctctacgttggaggctcatcgttcctattcaggcagatgttatcgaggtccgacnnnnnnctcctaacgatccttaccacatacttctagatcggatacgcatgaggct

SEQ ID NO: 4603 - DNA, 146 bp, Artificial Sequence
  Bisulfite Padlock Probe
  misc_feature 92, 93, 94, 95, 96, 97: n = A,T,C or G
gactggaagagcactgttcccctcttctccgccttctctctacgttggaggctcatcgttcctattcaggcagatgttatcgaggtccgacnnnnnnctcctaacgatccttaccgcatacttctagatcggatacgcatgaggct

SEQ ID NO: 4604 - DNA, 146 bp, Artificial Sequence
  Bisulfite Padlock Probe
  misc_feature 94, 95, 96, 97, 98, 99: n = A,T,C or G
gactggaagagcactgttccccttacccaatcaaatccttccctcgttggaggctcatcgttcctattcaggcagatgttatcgaggtccgacnnnnnnccaacctccgccgctaaaaactcattagatcggatacgcatgaggct

SEQ ID NO: 4605 - DNA, 146 bp, Artificial Sequence
  Bisulfite Padlock Probe
  misc_feature 94, 95, 96, 97, 98, 99: n = A,T,C or G
gactggaagagcactgttccccttacccaatcgaatccttccctcgttggaggctcatcgttcctattcaggcagatgttatcgaggtccgacnnnnnnccaacctccgccgctaaaaactcgttagatcggatacgcatgaggct

SEQ ID NO: 4606 - DNA, 146 bp, Artificial Sequence
  Bisulfite Padlock Probe
  misc_feature 96, 97, 98, 99, 100, 101: n = A,T,C or G
gactggaagagcactgttccccttccaactaaactttataacaccacgttggaggctcatcgttcctattcaggcagatgttatcgaggtccgacnnnnnncccttccgcgccataaaacctaatcgatcggatacgcatgaggct

SEQ ID NO: 4607 - DNA, 146 bp, Artificial Sequence
  Bisulfite Padlock Probe
  misc_feature 96, 97, 98, 99, 100, 101: n = A,T,C or G
gactggaagagcactgttccccttccaactaaactttataacaccacgttggaggctcatcgttcctattcaggcagatgttatcgaggtccgacnnnnnncccttccgcgccgtaaaacctaatcgatcggatacgcatgaggct

SEQ ID NO: 4608 - DNA, 146 bp, Artificial Sequence
  Bisulfite Padlock Probe
  misc_feature 94, 95, 96, 97, 98, 99: n = A,T,C or G
gactggaagagcactgttccccttcctttccgaaaacccaaaaaagttggaggctcatcgttcctattcaggcagatgttatcgaggtccgacnnnnnncacaacgaccgaaatcgaacaaaaatcgatcggatacgcatgaggct

SEQ ID NO: 4609 - DNA, 146 bp, Artificial Sequence
  Bisulfite Padlock Probe
  misc_feature 94, 95, 96, 97, 98, 99: n = A,T,C or G
gactggaagagcactgttccccttcctttccgaaaacccgaaaaagttggaggctcatcgttcctattcaggcagatgttatcgaggtccgacnnnnnncacaacgaccgaaatcgaacgaaaatcgatcggatacgcatgaggct

SEQ ID NO: 4610 - DNA, 146 bp, Artificial Sequence
  Bisulfite Padlock Probe
  misc_feature 93, 94, 95, 96, 97, 98: n = A,T,C or G
gactggaagagcactgttcccgaaaactacaaatcctcactaacgttggaggctcatcgttcctattcaggcagatgttatcgaggtccgacnnnnnntttaacatttataacaactataaactccgatcggatacgcatgaggct

SEQ ID NO: 4611 - DNA, 146 bp, Artificial Sequence
  Bisulfite Padlock Probe
  misc_feature 93, 94, 95, 96, 97, 98: n = A,T,C or G
gactggaagagcactgttcccgaaaactacgaatcctcactaacgttggaggctcatcgttcctattcaggcagatgttatcgaggtccgacnnnnnntttaacatttataacaactataaactccgatcggatacgcatgaggct

SEQ ID NO: 4612 - DNA, 146 bp, Artificial Sequence
  Bisulfite Padlock Probe
  misc_feature 95, 96, 97, 98, 99, 100: n = A,T,C or G
gactggaagagcactgttcccgaaaccgcactaatcattaacaaaagttggaggctcatcgttcctattcaggcagatgttatcgaggtccgacnnnnnnaataaccgaacaaccaacaaaaactcgatcggatacgcatgaggct

SEQ ID NO: 4613 - DNA, 146 bp, Artificial Sequence
  Bisulfite Padlock Probe
  misc_feature 95, 96, 97, 98, 99, 100: n = A,T,C or G
gactggaagagcactgttcccgaaaccgcactaatcgttaacaaaagttggaggctcatcgttcctattcaggcagatgttatcgaggtccgacnnnnnnaataaccgaacgaccaacaaaaactcgatcggatacgcatgaggct

SEQ ID NO: 4614 - DNA, 146 bp, Artificial Sequence
  Bisulfite Padlock Probe
  misc_feature 92, 93, 94, 95, 96, 97: n = A,T,C or G
gactggaagagcactgttcccgaaacctttcaaacccacaaacgttggaggctcatcgttcctattcaggcagatgttatcgaggtccgacnnnnnnaaaaacaaaatataaaaactactctaattgatcggatacgcatgaggct

SEQ ID NO: 4615 - DNA, 146 bp, Artificial Sequence
  Bisulfite Padlock Probe
  misc_feature 93, 94, 95, 96, 97, 98: n = A,T,C or G
gactggaagagcactgttcccgaaactacaaaacacccctaaacgttggaggctcatcgttcctattcaggcagatgttatcgaggtccgacnnnnnntcaaaccattccctactcaacaaaaaccgatcggatacgcatgaggct

SEQ ID NO: 4616 - DNA, 146 bp, Artificial Sequence
  Bisulfite Padlock Probe
  misc_feature 93, 94, 95, 96, 97, 98: n = A,T,C or G
gactggaagagcactgttcccgaaactacgaaacacccctaaacgttggaggctcatcgttcctattcaggcagatgttatcgaggtccgacnnnnnntcaaaccgttccctactcaacaaaaaccgatcggatacgcatgaggct

SEQ ID NO: 4617 - DNA, 146 bp, Artificial Sequence
  Bisulfite Padlock Probe
  misc_feature 92, 93, 94, 95, 96, 97: n = A,T,C or G
gactggaagagcactgttcccgaaactctacacccacctctacgttggaggctcatcgttcctattcaggcagatgttatcgaggtccgacnnnnnncctaccccgctctcctacaataatccaacgatcggatacgcatgaggct

SEQ ID NO: 4618 - DNA, 146 bp, Artificial Sequence
  Bisulfite Padlock Probe
  misc_feature 92, 93, 94, 95, 96, 97: n = A,T,C or G
gactggaagagcactgttcccgaaactctacgcccacctctacgttggaggctcatcgttcctattcaggcagatgttatcgaggtccgacnnnnnncctaccccgctctcctacaataatccgacgatcggatacgcatgaggct

SEQ ID NO: 4619 - DNA, 146 bp, Artificial Sequence
  Bisulfite Padlock Probe
  misc_feature 92, 93, 94, 95, 96, 97: n = A,T,C or G
gactggaagagcactgttcccgaaatcattaacttcatctcctgttggaggctcatcgttcctattcaggcagatgttatcgaggtccgacnnnnnncattaatcccctctcctatccaaataacagatcggatacgcatgaggct

SEQ ID NO: 4620 - DNA, 146 bp, Artificial Sequence
  Bisulfite Padlock Probe
  misc_feature 92, 93, 94, 95, 96, 97: n = A,T,C or G
gactggaagagcactgttcccgaaatcattaacttcgtctcctgttggaggctcatcgttcctattcaggcagatgttatcgaggtccgacnnnnnncattaatcccctctcctatccgaataacagatcggatacgcatgaggct

SEQ ID NO: 4621 - DNA, 146 bp, Artificial Sequence
  Bisulfite Padlock Probe
  misc_feature 92, 93, 94, 95, 96, 97: n = A,T,C or G
gactggaagagcactgttcccgaacccgaaaatacccacaaacgttggaggctcatcgttcctattcaggcagatgttatcgaggtccgacnnnnnnaaacgaaacgtacacgtacttcataaaaagatcggatacgcatgaggct

SEQ ID NO: 4622 - DNA, 146 bp, Artificial Sequence
  Bisulfite Padlock Probe
  misc_feature 92, 93, 94, 95, 96, 97: n = A,T,C or G
gactggaagagcactgttcccgaacccgaaaatacccgcaaacgttggaggctcatcgttcctattcaggcagatgttatcgaggtccgacnnnnnnaaacgaaacgtacacgtacttcgtaaaaagatcggatacgcatgaggct

SEQ ID NO: 4623 - DNA, 146 bp, Artificial Sequence
  Bisulfite Padlock Probe
  misc_feature 92, 93, 94, 95, 96, 97: n = A,T,C or G
gactggaagagcactgttcccgaaccgtcccgaaaaacatactgttggaggctcatcgttcctattcaggcagatgttatcgaggtccgacnnnnnnaccaaaacttccgcctacaaaatatccccgatcggatacgcatgaggct

SEQ ID NO: 4624 - DNA, 146 bp, Artificial Sequence
  Bisulfite Padlock Probe
  misc_feature 92, 93, 94, 95, 96, 97: n = A,T,C or G
gactggaagagcactgttcccgaaccgtcccgaaaaacgtactgttggaggctcatcgttcctattcaggcagatgttatcgaggtccgacnnnnnnaccaaaacttccgcctacgaaatatccccgatcggatacgcatgaggct

SEQ ID NO: 4625 - DNA, 146 bp, Artificial Sequence
  Bisulfite Padlock Probe
  misc_feature 94, 95, 96, 97, 98, 99: n = A,T,C or G
gactggaagagcactgttcccgacaccaaataccctaaataaaaagttggaggctcatcgttcctattcaggcagatgttatcgaggtccgacnnnnnncaacctcccaaacactacaacaaaatcgatcggatacgcatgaggct

SEQ ID NO: 4626 - DNA, 146 bp, Artificial Sequence
  Bisulfite Padlock Probe
  misc_feature 94, 95, 96, 97, 98, 99: n = A,T,C or G
gactggaagagcactgttcccgaccgacgccgaatacatataaacgttggaggctcatcgttcctattcaggcagatgttatcgaggtccgacnnnnnnaaacgacgaaccgaaaaccgaaaaccagatcggatacgcatgaggct

SEQ ID NO: 4627 - DNA, 146 bp, Artificial Sequence
  Bisulfite Padlock Probe
  misc_feature 94, 95, 96, 97, 98, 99: n = A,T,C or G
gactggaagagcactgttcccgaccgacgccgaatacgtataaacgttggaggctcatcgttcctattcaggcagatgttatcgaggtccgacnnnnnnaaacgacgaaccgaaaaccgaaaaccggatcggatacgcatgaggct

SEQ ID NO: 4628 - DNA, 146 bp, Artificial Sequence
  Bisulfite Padlock Probe
  misc_feature 94, 95, 96, 97, 98, 99: n = A,T,C or G
gactggaagagcactgttcccgacgccaaataccctaaataaaaagttggaggctcatcgttcctattcaggcagatgttatcgaggtccgacnnnnnncaacctcccaaacactacaacgaaatcgatcggatacgcatgaggct

SEQ ID NO: 4629 - DNA, 146 bp, Artificial Sequence
  Bisulfite Padlock Probe
  misc_feature 92, 93, 94, 95, 96, 97: n = A,T,C or G
gactggaagagcactgttcccgactaaaactaaaacaaaaaccgttggaggctcatcgttcctattcaggcagatgttatcgaggtccgacnnnnnntaacaaaaacccttcaaccacctcctcccgatcggatacgcatgaggct

SEQ ID NO: 4630 - DNA, 146 bp, Artificial Sequence
  Bisulfite Padlock Probe
  misc_feature 93, 94, 95, 96, 97, 98: n = A,T,C or G
gactggaagagcactgttcccgatccgcatctcctaaaataatcgttggaggctcatcgttcctattcaggcagatgttatcgaggtccgacnnnnnnctactacaccattccgaccaacaacctcgatcggatacgcatgaggct

SEQ ID NO: 4631 - DNA, 146 bp, Artificial Sequence
  Bisulfite Padlock Probe
  misc_feature 93, 94, 95, 96, 97, 98: n = A,T,C or G
gactggaagagcactgttcccgatccgcgtctcctaaaataatcgttggaggctcatcgttcctattcaggcagatgttatcgaggtccgacnnnnnnctactacaccattccgaccaacgacctcgatcggatacgcatgaggct

SEQ ID NO: 4632 - DNA, 146 bp, Artificial Sequence
  Bisulfite Padlock Probe
  misc_feature 93, 94, 95, 96, 97, 98: n = A,T,C or G
gactggaagagcactgttcccgcaataaacctcaactaccctaagttggaggctcatcgttcctattcaggcagatgttatcgaggtccgacnnnnnnaatctatccgcccaactcctactaaaaagatcggatacgcatgaggct

SEQ ID NO: 4633 - DNA, 146 bp, Artificial Sequence
  Bisulfite Padlock Probe
  misc_feature 96, 97, 98, 99, 100, 101: n = A,T,C or G
gactggaagagcactgttcccgcacgtccaactcataaatatcctaagttggaggctcatcgttcctattcaggcagatgttatcgaggtccgacnnnnnngaactaacgtccgctcccccaaatagatcggatacgcatgaggct

SEQ ID NO: 4634 - DNA, 146 bp, Artificial Sequence
  Bisulfite Padlock Probe
  misc_feature 96, 97, 98, 99, 100, 101: n = A,T,C or G
gactggaagagcactgttcccgcacgtccaactcgtaaatatcctaagttggaggctcatcgttcctattcaggcagatgttatcgaggtccgacnnnnnngaactaacgtccgctcccccgaatagatcggatacgcatgaggct

SEQ ID NO: 4635 - DNA, 146 bp, Artificial Sequence
  Bisulfite Padlock Probe
  misc_feature 95, 96, 97, 98, 99, 100: n = A,T,C or G
gactggaagagcactgttcccgcatacccaacctactaaaccacacgttggaggctcatcgttcctattcaggcagatgttatcgaggtccgacnnnnnnttcgacccgaacctcccgaaataaccgatcggatacgcatgaggct

SEQ ID NO: 4636 - DNA, 146 bp, Artificial Sequence
  Bisulfite Padlock Probe
  misc_feature 92, 93, 94, 95, 96, 97: n = A,T,C or G
gactggaagagcactgttcccgccaacttctacctccaattaagttggaggctcatcgttcctattcaggcagatgttatcgaggtccgacnnnnnncctcttaacgctaccccaacctctctattgatcggatacgcatgaggct

SEQ ID NO: 4637 - DNA, 146 bp, Artificial Sequence
  Bisulfite Padlock Probe
  misc_feature 95, 96, 97, 98, 99, 100: n = A,T,C or G
gactggaagagcactgttcccgccccctatcctacaaaaactacacgttggaggctcatcgttcctattcaggcagatgttatcgaggtccgacnnnnnnttactctacgcctccccgatactcccgatcggatacgcatgaggct

SEQ ID NO: 4638 - DNA, 146 bp, Artificial Sequence
  Bisulfite Padlock Probe
  misc_feature 92, 93, 94, 95, 96, 97: n = A,T,C or G
gactggaagagcactgttcccgccgacttctacctccaattaagttggaggctcatcgttcctattcaggcagatgttatcgaggtccgacnnnnnncctcttaacgctaccccgacctctctattgatcggatacgcatgaggct

SEQ ID NO: 4639 - DNA, 146 bp, Artificial Sequence
  Bisulfite Padlock Probe
  misc_feature 92, 93, 94, 95, 96, 97: n = A,T,C or G
gactggaagagcactgttcccgcctacctacctacccaaaaaagttggaggctcatcgttcctattcaggcagatgttatcgaggtccgacnnnnnnaaaataaccgcaactacaaaaactcaaacgatcggatacgcatgaggct

SEQ ID NO: 4640 - DNA, 146 bp, Artificial Sequence
  Bisulfite Padlock Probe
  misc_feature 92, 93, 94, 95, 96, 97: n = A,T,C or G
gactggaagagcactgttcccgcctacctacctacccgaaaaagttggaggctcatcgttcctattcaggcagatgttatcgaggtccgacnnnnnnaaaataaccgcgactacaaaaactcaaacgatcggatacgcatgaggct

SEQ ID NO: 4641 - DNA, 146 bp, Artificial Sequence
  Bisulfite Padlock Probe
  misc_feature 94, 95, 96, 97, 98, 99: n = A,T,C or G
gactggaagagcactgttcccgcgaaccctacaaacacctaaaatgttggaggctcatcgttcctattcaggcagatgttatcgaggtccgacnnnnnncgatacgatccaaaacgcgacacataagatcggatacgcatgaggct

SEQ ID NO: 4642 - DNA, 146 bp, Artificial Sequence
  Bisulfite Padlock Probe
  misc_feature 94, 95, 96, 97, 98, 99: n = A,T,C or G
gactggaagagcactgttcccgcgaaccctacgaacacctaaaatgttggaggctcatcgttcctattcaggcagatgttatcgaggtccgacnnnnnncgatacgatccaaaacgcgacgcataagatcggatacgcatgaggct

SEQ ID NO: 4643 - DNA, 146 bp, Artificial Sequence
  Bisulfite Padlock Probe
  misc_feature 93, 94, 95, 96, 97, 98: n = A,T,C or G
gactggaagagcactgttcccgcgataaacctcaactaccctaagttggaggctcatcgttcctattcaggcagatgttatcgaggtccgacnnnnnnaatctatccgcccgactcctactaaaaagatcggatacgcatgaggct

SEQ ID NO: 4644 - DNA, 146 bp, Artificial Sequence
  Bisulfite Padlock Probe
  misc_feature 93, 94, 95, 96, 97, 98: n = A,T,C or G
gactggaagagcactgttcccgctcccaaatttccctccatctcgttggaggctcatcgttcctattcaggcagatgttatcgaggtccgacnnnnnnaaaaacgcaaacactaattttccaaaaagatcggatacgcatgaggct

SEQ ID NO: 4645 - DNA, 146 bp, Artificial Sequence
  Bisulfite Padlock Probe
  misc_feature 92, 93, 94, 95, 96, 97: n = A,T,C or G
gactggaagagcactgttcccgctccgatctctacgcaatctagttggaggctcatcgttcctattcaggcagatgttatcgaggtccgacnnnnnnaccgaaatcactcactcccctctcaaaatgatcggatacgcatgaggct

SEQ ID NO: 4646 - DNA, 146 bp, Artificial Sequence
  Bisulfite Padlock Probe
  misc_feature 92, 93, 94, 95, 96, 97: n = A,T,C or G
gactggaagagcactgttcccgctccgatctctacgcgatctagttggaggctcatcgttcctattcaggcagatgttatcgaggtccgacnnnnnnaccgaaatcactcactcccctctcgaaatgatcggatacgcatgaggct

SEQ ID NO: 4647 - DNA, 146 bp, Artificial Sequence
  Bisulfite Padlock Probe
  misc_feature 92, 93, 94, 95, 96, 97: n = A,T,C or G
gactggaagagcactgttcccgcttccaaacaacaacttctacgttggaggctcatcgttcctattcaggcagatgttatcgaggtccgacnnnnnnacccaataccctcctcttaaccctcaaacgatcggatacgcatgaggct

SEQ ID NO: 4648 - DNA, 146 bp, Artificial Sequence
  Bisulfite Padlock Probe
  misc_feature 92, 93, 94, 95, 96, 97: n = A,T,C or G
gactggaagagcactgttcccgcttccaaacaacgacttctacgttggaggctcatcgttcctattcaggcagatgttatcgaggtccgacnnnnnnacccaataccctcctcttaaccctcgaacgatcggatacgcatgaggct

SEQ ID NO: 4649 - DNA, 146 bp, Artificial Sequence
  Bisulfite Padlock Probe
  misc_feature 92, 93, 94, 95, 96, 97: n = A,T,C or G
gactggaagagcactgttcccgtaaacccgcgactaacaactcgttggaggctcatcgttcctattcaggcagatgttatcgaggtccgacnnnnnnataaacaacaaatccttcttcaaacccccgatcggatacgcatgaggct

SEQ ID NO: 4650 - DNA, 146 bp, Artificial Sequence
  Bisulfite Padlock Probe
  misc_feature 92, 93, 94, 95, 96, 97: n = A,T,C or G
gactggaagagcactgttcccgtaaacccgcgactaacgactcgttggaggctcatcgttcctattcaggcagatgttatcgaggtccgacnnnnnnataaacaacgaatccttcttcaaacccccgatcggatacgcatgaggct

SEQ ID NO: 4651 - DNA, 146 bp, Artificial Sequence
  Bisulfite Padlock Probe
  misc_feature 92, 93, 94, 95, 96, 97: n = A,T,C or G
gactggaagagcactgttcccgtactcctaacccaacaccaacgttggaggctcatcgttcctattcaggcagatgttatcgaggtccgacnnnnnntacaaaacacccgccgaccattatcattcgatcggatacgcatgaggct

SEQ ID NO: 4652 - DNA, 146 bp, Artificial Sequence
  Bisulfite Padlock Probe
  misc_feature 94, 95, 96, 97, 98, 99: n = A,T,C or G
gactggaagagcactgttccctaaaaacatcactaaaacccctacgttggaggctcatcgttcctattcaggcagatgttatcgaggtccgacnnnnnntctaaaaatacaatttttaaaatatttgatcggatacgcatgaggct

SEQ ID NO: 4653 - DNA, 146 bp, Artificial Sequence
  Bisulfite Padlock Probe
  misc_feature 94, 95, 96, 97, 98, 99: n = A,T,C or G
gactggaagagcactgttccctaaaaacgtcactaaaacccctacgttggaggctcatcgttcctattcaggcagatgttatcgaggtccgacnnnnnntctaaaaatacaatttttaaaatatttgatcggatacgcatgaggct

SEQ ID NO: 4654 - DNA, 146 bp, Artificial Sequence
  Bisulfite Padlock Probe
  misc_feature 93, 94, 95, 96, 97, 98: n = A,T,C or G
gactggaagagcactgttccctaaaactcgcctatacatcccccgttggaggctcatcgttcctattcaggcagatgttatcgaggtccgacnnnnnncaattaaaacgcgcttccaacaacaacagatcggatacgcatgaggct

SEQ ID NO: 4655 - DNA, 146 bp, Artificial Sequence
  Bisulfite Padlock Probe
  misc_feature 93, 94, 95, 96, 97, 98: n = A,T,C or G
gactggaagagcactgttccctaaaactcgcctatacgtcccccgttggaggctcatcgttcctattcaggcagatgttatcgaggtccgacnnnnnncaattaaaacgcgcttccaacgacaacagatcggatacgcatgaggct

SEQ ID NO: 4656 - DNA, 146 bp, Artificial Sequence
  Bisulfite Padlock Probe
  misc_feature 95, 96, 97, 98, 99, 100: n = A,T,C or G
gactggaagagcactgttccctaaaattccaactcctctctcctccgttggaggctcatcgttcctattcaggcagatgttatcgaggtccgacnnnnnnacaaaaacaaatctacaaaacaaaaagatcggatacgcatgaggct

SEQ ID NO: 4657 - DNA, 146 bp, Artificial Sequence
  Bisulfite Padlock Probe
  misc_feature 95, 96, 97, 98, 99, 100: n = A,T,C or G
gactggaagagcactgttccctaaaattccaactcctctctcctccgttggaggctcatcgttcctattcaggcagatgttatcgaggtccgacnnnnnnacaaaaacaaatctacgaaacaaaaagatcggatacgcatgaggct

SEQ ID NO: 4658 - DNA, 146 bp, Artificial Sequence
  Bisulfite Padlock Probe
  misc_feature 92, 93, 94, 95, 96, 97: n = A,T,C or G
gactggaagagcactgttccctaaactaaacaaaataaaccccgttggaggctcatcgttcctattcaggcagatgttatcgaggtccgacnnnnnntactttaacgaaacaacaacttaaaaaccgatcggatacgcatgaggct

SEQ ID NO: 4659 - DNA, 146 bp, Artificial Sequence
  Bisulfite Padlock Probe
  misc_feature 92, 93, 94, 95, 96, 97: n = A,T,C or G
gactggaagagcactgttccctaaactaaacaaaataaaccccgttggaggctcatcgttcctattcaggcagatgttatcgaggtccgacnnnnnntactttaacgaaacaacgacttaaaaaccgatcggatacgcatgaggct

SEQ ID NO: 4660 - DNA, 146 bp, Artificial Sequence
  Bisulfite Padlock Probe
  misc_feature 96, 97, 98, 99, 100, 101: n = A,T,C or G
gactggaagagcactgttccctaacgaactcaccactaactctactcgttggaggctcatcgttcctattcaggcagatgttatcgaggtccgacnnnnnnaaaaataaataacgccgaccccaccgatcggatacgcatgaggct

SEQ ID NO: 4661 - DNA, 146 bp, Artificial Sequence
  Bisulfite Padlock Probe
  misc_feature 96, 97, 98, 99, 100, 101: n = A,T,C or G
gactggaagagcactgttccctaacgaactcgccactaactctactcgttggaggctcatcgttcctattcaggcagatgttatcgaggtccgacnnnnnnaaaaataaataacgccgaccccgccgatcggatacgcatgaggct

SEQ ID NO: 4662 - DNA, 146 bp, Artificial Sequence
  Bisulfite Padlock Probe
  misc_feature 95, 96, 97, 98, 99, 100: n = A,T,C or G
gactggaagagcactgttccctaacgacgaaacacgaacaacaactgttggaggctcatcgttcctattcaggcagatgttatcgaggtccgacnnnnnnaaaacgacccatccaataacaactacgatcggatacgcatgaggct

SEQ ID NO: 4663 - DNA, 146 bp, Artificial Sequence
  Bisulfite Padlock Probe
  misc_feature 95, 96, 97, 98, 99, 100: n = A,T,C or G
gactggaagagcactgttccctaacgacgaaacacgaacgacaactgttggaggctcatcgttcctattcaggcagatgttatcgaggtccgacnnnnnnaaaacgacccgtccaataacaactacgatcggatacgcatgaggct

SEQ ID NO: 4664 - DNA, 146 bp, Artificial Sequence
  Bisulfite Padlock Probe
  misc_feature 95, 96, 97, 98, 99, 100: n = A,T,C or G
gactggaagagcactgttccctaacgctacgactaccaccttatacgttggaggctcatcgttcctattcaggcagatgttatcgaggtccgacnnnnnncaaattacccgacaccctataactacgatcggatacgcatgaggct

SEQ ID NO: 4665 - DNA, 146 bp, Artificial Sequence
  Bisulfite Padlock Probe
  misc_feature 95, 96, 97, 98, 99, 100: n = A,T,C or G
gactggaagagcactgttccctaacgctacgactaccgccttatacgttggaggctcatcgttcctattcaggcagatgttatcgaggtccgacnnnnnncaaattacccgacgccctataactacgatcggatacgcatgaggct

SEQ ID NO: 4666 - DNA, 146 bp, Artificial Sequence
  Bisulfite Padlock Probe
  misc_feature 92, 93, 94, 95, 96, 97: n = A,T,C or G
gactggaagagcactgttccctacaaaccccaaaatccaaaaagttggaggctcatcgttcctattcaggcagatgttatcgaggtccgacnnnnnnttcaaacctcacattccccctcttaatttgatcggatacgcatgaggct

SEQ ID NO: 4667 - DNA, 146 bp, Artificial Sequence
  Bisulfite Padlock Probe
  misc_feature 92, 93, 94, 95, 96, 97: n = A,T,C or G
gactggaagagcactgttccctacaaaccccgaaatccaaaaagttggaggctcatcgttcctattcaggcagatgttatcgaggtccgacnnnnnnttcaaacctcacattccccctcttaatttgatcggatacgcatgaggct

SEQ ID NO: 4668 - DNA, 146 bp, Artificial Sequence
  Bisulfite Padlock Probe
  misc_feature 92, 93, 94, 95, 96, 97: n = A,T,C or G
gactggaagagcactgttccctacaacaacctctaaacaaaacgttggaggctcatcgttcctattcaggcagatgttatcgaggtccgacnnnnnntaaaacccaaaacaacaaactccaaactcgatcggatacgcatgaggct

SEQ ID NO: 4669 - DNA, 146 bp, Artificial Sequence
  Bisulfite Padlock Probe
  misc_feature 92, 93, 94, 95, 96, 97: n = A,T,C or G
gactggaagagcactgttccctacaaccacgatctacaaaaaagttggaggctcatcgttcctattcaggcagatgttatcgaggtccgacnnnnnnataaaacaaatactataccacgacacaacgatcggatacgcatgaggct

SEQ ID NO: 4670 - DNA, 146 bp, Artificial Sequence
  Bisulfite Padlock Probe
  misc_feature 92, 93, 94, 95, 96, 97: n = A,T,C or G
gactggaagagcactgttccctacaaccacgatctacgaaaaagttggaggctcatcgttcctattcaggcagatgttatcgaggtccgacnnnnnnataaaacaaatactataccacgacacgacgatcggatacgcatgaggct

SEQ ID NO: 4671 - DNA, 146 bp, Artificial Sequence
  Bisulfite Padlock Probe
  misc_feature 92, 93, 94, 95, 96, 97: n = A,T,C or G
gactggaagagcactgttccctacccaaatcccactaactcccgttggaggctcatcgttcctattcaggcagatgttatcgaggtccgacnnnnnnaaaaacgctaaccactcacctaatacatcgatcggatacgcatgaggct

SEQ ID NO: 4672 - DNA, 146 bp, Artificial Sequence
  Bisulfite Padlock Probe
  misc_feature 92, 93, 94, 95, 96, 97: n = A,T,C or G
gactggaagagcactgttccctacccaaatcccgctaactcccgttggaggctcatcgttcctattcaggcagatgttatcgaggtccgacnnnnnnaaaaacgctaaccgctcacctaatacatcgatcggatacgcatgaggct

SEQ ID NO: 4673 - DNA, 146 bp, Artificial Sequence
  Bisulfite Padlock Probe
  misc_feature 92, 93, 94, 95, 96, 97: n = A,T,C or G
gactggaagagcactgttccctaccttaccctacccacaacttgttggaggctcatcgttcctattcaggcagatgttatcgaggtccgacnnnnnntaaaacaaaaacaacctctcaacaccaacgatcggatacgcatgaggct

SEQ ID NO: 4674 - DNA, 146 bp, Artificial Sequence
  Bisulfite Padlock Probe
  misc_feature 92, 93, 94, 95, 96, 97: n = A,T,C or G
gactggaagagcactgttccctaccttaccctacccgcaacttgttggaggctcatcgttcctattcaggcagatgttatcgaggtccgacnnnnnntaaaacaaaaacgacctctcaacaccaacgatcggatacgcatgaggct

SEQ ID NO: 4675 - DNA, 146 bp, Artificial Sequence
  Bisulfite Padlock Probe
  misc_feature 94, 95, 96, 97, 98, 99: n = A,T,C or G
gactggaagagcactgttccctactacaaactttccaacaaatatgttggaggctcatcgttcctattcaggcagatgttatcgaggtccgacnnnnnncaaaccaaatcccgacctcccaaaatcgatcggatacgcatgaggct

SEQ ID NO: 4676 - DNA, 146 bp, Artificial Sequence
  Bisulfite Padlock Probe
  misc_feature 95, 96, 97, 98, 99, 100: n = A,T,C or G
gactggaagagcactgttccctactacgaaaactcaatcaaaaccagttggaggctcatcgttcctattcaggcagatgttatcgaggtccgacnnnnnnaacacaaccaaaaccataaaaataacgatcggatacgcatgaggct

SEQ ID NO: 4677 - DNA, 146 bp, Artificial Sequence
  Bisulfite Padlock Probe
  misc_feature 95, 96, 97, 98, 99, 100: n = A,T,C or G
gactggaagagcactgttccctactacgaaaactcgatcaaaaccagttggaggctcatcgttcctattcaggcagatgttatcgaggtccgacnnnnnnaacacaaccgaaaccataaaaataacgatcggatacgcatgaggct

SEQ ID NO: 4678 - DNA, 146 bp, Artificial Sequence
  Bisulfite Padlock Probe
  misc_feature 94, 95, 96, 97, 98, 99: n = A,T,C or G
gactggaagagcactgttccctactacgaactttccaacaaatatgttggaggctcatcgttcctattcaggcagatgttatcgaggtccgacnnnnnncaaaccaaatcccgacctcccgaaatcgatcggatacgcatgaggct

SEQ ID NO: 4679 - DNA, 146 bp, Artificial Sequence
  Bisulfite Padlock Probe
  misc_feature 92, 93, 94, 95, 96, 97: n = A,T,C or G
gactggaagagcactgttccctactccaaatccccaacctaacgttggaggctcatcgttcctattcaggcagatgttatcgaggtccgacnnnnnnttacctaaaataaaaaccaacacaaaaccgatcggatacgcatgaggct

SEQ ID NO: 4680 - DNA, 146 bp, Artificial Sequence
  Bisulfite Padlock Probe
  misc_feature 92, 93, 94, 95, 96, 97: n = A,T,C or G
gactggaagagcactgttccctactccaaatccccgacctaacgttggaggctcatcgttcctattcaggcagatgttatcgaggtccgacnnnnnnttacctaaaataaaaaccgacacaaaaccgatcggatacgcatgaggct

SEQ ID NO: 4681 - DNA, 146 bp, Artificial Sequence
  Bisulfite Padlock Probe
  misc_feature 92, 93, 94, 95, 96, 97: n = A,T,C or G
gactggaagagcactgttccctactcccgaaaaccaaatctctgttggaggctcatcgttcctattcaggcagatgttatcgaggtccgacnnnnnnatcaaaaataataataataaaaacacacagatcggatacgcatgaggct

SEQ ID NO: 4682 - DNA, 146 bp, Artificial Sequence
  Bisulfite Padlock Probe
  misc_feature 92, 93, 94, 95, 96, 97: n = A,T,C or G
gactggaagagcactgttccctactcccgaaaaccgaatctctgttggaggctcatcgttcctattcaggcagatgttatcgaggtccgacnnnnnnatcaaaaataataataataaaaacacacagatcggatacgcatgaggct

SEQ ID NO: 4683 - DNA, 146 bp, Artificial Sequence
  Bisulfite Padlock Probe
  misc_feature 96, 97, 98, 99, 100, 101: n = A,T,C or G
gactggaagagcactgttccctataattttctaaaacccccaaaaaagttggaggctcatcgttcctattcaggcagatgttatcgaggtccgacnnnnnnactccctataaaccaaacaaacaacgatcggatacgcatgaggct

SEQ ID NO: 4684 - DNA, 146 bp, Artificial Sequence
  Bisulfite Padlock Probe
  misc_feature 96, 97, 98, 99, 100, 101: n = A,T,C or G
gactggaagagcactgttccctataattttctaaaacccccgaaaaagttggaggctcatcgttcctattcaggcagatgttatcgaggtccgacnnnnnnactccctataaaccaaacaaacaacgatcggatacgcatgaggct

SEQ ID NO: 4685 - DNA, 146 bp, Artificial Sequence
  Bisulfite Padlock Probe
  misc_feature 96, 97, 98, 99, 100, 101: n = A,T,C or G
gactggaagagcactgttccctcaacccaaaatttctaaaacattaagttggaggctcatcgttcctattcaggcagatgttatcgaggtccgacnnnnnngacgaaaaccaaaacgacgcacaacgatcggatacgcatgaggct

SEQ ID NO: 4686 - DNA, 146 bp, Artificial Sequence
  Bisulfite Padlock Probe
  misc_feature 96, 97, 98, 99, 100, 101: n = A,T,C or G
gactggaagagcactgttccctcaacccaaaatttctaaaacattaagttggaggctcatcgttcctattcaggcagatgttatcgaggtccgacnnnnnngacgaaaaccaaaacgacgcgcaacgatcggatacgcatgaggct

SEQ ID NO: 4687 - DNA, 146 bp, Artificial Sequence
  Bisulfite Padlock Probe
  misc_feature 96, 97, 98, 99, 100, 101: n = A,T,C or G
gactggaagagcactgttccctcattaacatcccaaaacctaataccgttggaggctcatcgttcctattcaggcagatgttatcgaggtccgacnnnnnnaacgacgacctaacacctaaaatccgatcggatacgcatgaggct

SEQ ID NO: 4688 - DNA, 146 bp, Artificial Sequence
  Bisulfite Padlock Probe
  misc_feature 96, 97, 98, 99, 100, 101: n = A,T,C or G
gactggaagagcactgttccctcattaacatcccgaaacctaataccgttggaggctcatcgttcctattcaggcagatgttatcgaggtccgacnnnnnnaacgacgacctaacgcctaaaatccgatcggatacgcatgaggct

SEQ ID NO: 4689 - DNA, 146 bp, Artificial Sequence
  Bisulfite Padlock Probe
  misc_feature 94, 95, 96, 97, 98, 99: n = A,T,C or G
gactggaagagcactgttccctcccacccctttccctaaactaacgttggaggctcatcgttcctattcaggcagatgttatcgaggtccgacnnnnnnaccctcaatactacaaaaccccaaaacgatcggatacgcatgaggct

SEQ ID NO: 4690 - DNA, 146 bp, Artificial Sequence
  Bisulfite Padlock Probe
  misc_feature 94, 95, 96, 97, 98, 99: n = A,T,C or G
gactggaagagcactgttccctcccacccctttccctaaactaacgttggaggctcatcgttcctattcaggcagatgttatcgaggtccgacnnnnnnaccctcgatactacaaaaccccaaaacgatcggatacgcatgaggct

SEQ ID NO: 4691 - DNA, 146 bp, Artificial Sequence
  Bisulfite Padlock Probe
  misc_feature 93, 94, 95, 96, 97, 98: n = A,T,C or G
gactggaagagcactgttccctcctaaactccgaactaccacacgttggaggctcatcgttcctattcaggcagatgttatcgaggtccgacnnnnnntaacatccctatcaatcccaaattacccgatcggatacgcatgaggct

SEQ ID NO: 4692 - DNA, 146 bp, Artificial Sequence
  Bisulfite Padlock Probe
  misc_feature 93, 94, 95, 96, 97, 98: n = A,T,C or G
gactggaagagcactgttccctcctaaactccgaactaccgcacgttggaggctcatcgttcctattcaggcagatgttatcgaggtccgacnnnnnntaacatccctatcgatcccaaattacccgatcggatacgcatgaggct

SEQ ID NO: 4693 - DNA, 146 bp, Artificial Sequence
  Bisulfite Padlock Probe
  misc_feature 92, 93, 94, 95, 96, 97: n = A,T,C or G
gactggaagagcactgttccctcctttctttccctacttctccgttggaggctcatcgttcctattcaggcagatgttatcgaggtccgacnnnnnncctatacaaacctaccaaacccacaactcgatcggatacgcatgaggct

SEQ ID NO: 4694 - DNA, 146 bp, Artificial Sequence
  Bisulfite Padlock Probe
  misc_feature 92, 93, 94, 95, 96, 97: n = A,T,C or G
gactggaagagcactgttccctcctttctttccctacttctccgttggaggctcatcgttcctattcaggcagatgttatcgaggtccgacnnnnnncctatacgaacctaccaaacccacaactcgatcggatacgcatgaggct

SEQ ID NO: 4695 - DNA, 146 bp, Artificial Sequence
  Bisulfite Padlock Probe
  misc_feature 92, 93, 94, 95, 96, 97: n = A,T,C or G
gactggaagagcactgttccctcgacctcctcacccaaataaagttggaggctcatcgttcctattcaggcagatgttatcgaggtccgacnnnnnnctcttaaacgaaaacgaactctcaaacacgatcggatacgcatgaggct

SEQ ID NO: 4696 - DNA, 146 bp, Artificial Sequence
  Bisulfite Padlock Probe
  misc_feature 92, 93, 94, 95, 96, 97: n = A,T,C or G
gactggaagagcactgttccctcgacctcctcgcccaaataaagttggaggctcatcgttcctattcaggcagatgttatcgaggtccgacnnnnnnctcttaaacgaaaacgaactctcgaacacgatcggatacgcatgaggct

SEQ ID NO: 4697 - DNA, 146 bp, Artificial Sequence
  Bisulfite Padlock Probe
  misc_feature 95, 96, 97, 98, 99, 100: n = A,T,C or G
gactggaagagcactgttccctcgactcgccaactaattttctctagttggaggctcatcgttcctattcaggcagatgttatcgaggtccgacnnnnnnaaacccaaacgaaactcaaacaaaacgatcggatacgcatgaggct

SEQ ID NO: 4698 - DNA, 146 bp, Artificial Sequence
  Bisulfite Padlock Probe
  misc_feature 95, 96, 97, 98, 99, 100: n = A,T,C or G
gactggaagagcactgttccctcgactcgccgactaattttctctagttggaggctcatcgttcctattcaggcagatgttatcgaggtccgacnnnnnnaaacccaaacgaaactcaaacgaaacgatcggatacgcatgaggct

SEQ ID NO: 4699 - DNA, 146 bp, Artificial Sequence
  Bisulfite Padlock Probe
  misc_feature 96, 97, 98, 99, 100, 101: n = A,T,C or G
gactggaagagcactgttccctcgacttaaactaaaaacgccaaaaagttggaggctcatcgttcctattcaggcagatgttatcgaggtccgacnnnnnnataaaactaaaacaaaaactaccccgatcggatacgcatgaggct

SEQ ID NO: 4700 - DNA, 146 bp, Artificial Sequence
  Bisulfite Padlock Probe
  misc_feature 96, 97, 98, 99, 100, 101: n = A,T,C or G
gactggaagagcactgttccctcgacttaaactaaaaacgccgaaaagttggaggctcatcgttcctattcaggcagatgttatcgaggtccgacnnnnnnataaaactaaaacgaaaactaccccgatcggatacgcatgaggct

SEQ ID NO: 4701 - DNA, 146 bp, Artificial Sequence
  Bisulfite Padlock Probe
  misc_feature 96, 97, 98, 99, 100, 101: n = A,T,C or G
gactggaagagcactgttccctctacaaaaatactccaataaaaaccgttggaggctcatcgttcctattcaggcagatgttatcgaggtccgacnnnnnnacactcccgacgaaacaactcttacgatcggatacgcatgaggct

SEQ ID NO: 4702 - DNA, 146 bp, Artificial Sequence
  Bisulfite Padlock Probe
  misc_feature 96, 97, 98, 99, 100, 101: n = A,T,C or G
gactggaagagcactgttccctctacaaaaatactccgataaaaaccgttggaggctcatcgttcctattcaggcagatgttatcgaggtccgacnnnnnnacactcccgacgaaacgactcttacgatcggatacgcatgaggct

SEQ ID NO: 4703 - DNA, 146 bp, Artificial Sequence
  Bisulfite Padlock Probe
  misc_feature 96, 97, 98, 99, 100, 101: n = A,T,C or G
gactggaagagcactgttccctctatacaaaaaacaactaaaacaaagttggaggctcatcgttcctattcaggcagatgttatcgaggtccgacnnnnnnccgcctaaaaacgtctacacaaaaagatcggatacgcatgaggct

SEQ ID NO: 4704 - DNA, 146 bp, Artificial Sequence
  Bisulfite Padlock Probe
  misc_feature 96, 97, 98, 99, 100, 101: n = A,T,C or G
gactggaagagcactgttccctctatacgaaaaacaactaaaacaaagttggaggctcatcgttcctattcaggcagatgttatcgaggtccgacnnnnnnccgcctaaaaacgtctacgcaaaaagatcggatacgcatgaggct

SEQ ID NO: 4705 - DNA, 146 bp, Artificial Sequence
  Bisulfite Padlock Probe
  misc_feature 93, 94, 95, 96, 97, 98: n = A,T,C or G
gactggaagagcactgttccctctcccatatccccctattctacgttggaggctcatcgttcctattcaggcagatgttatcgaggtccgacnnnnnnccctacccctctcaaaaactacccattcgatcggatacgcatgaggct

SEQ ID NO: 4706 - DNA, 146 bp, Artificial Sequence
  Bisulfite Padlock Probe
  misc_feature 93, 94, 95, 96, 97, 98: n = A,T,C or G
gactggaagagcactgttccctctcccgtatccccctattctacgttggaggctcatcgttcctattcaggcagatgttatcgaggtccgacnnnnnnccctacccctctcaaaaactacccattcgatcggatacgcatgaggct

SEQ ID NO: 4707 - DNA, 146 bp, Artificial Sequence
  Bisulfite Padlock Probe
  misc_feature 95, 96, 97, 98, 99, 100: n = A,T,C or G
gactggaagagcactgttccctctccctaccctaaaacccaatcaagttggaggctcatcgttcctattcaggcagatgttatcgaggtccgacnnnnnnaacgaaaatcaacaaataataaaaccgatcggatacgcatgaggct

SEQ ID NO: 4708 - DNA, 146 bp, Artificial Sequence
  Bisulfite Padlock Probe
  misc_feature 95, 96, 97, 98, 99, 100: n = A,T,C or G
gactggaagagcactgttccctctccctaccctaaaacccaatcaagttggaggctcatcgttcctattcaggcagatgttatcgaggtccgacnnnnnnaacgaaaatcaacgaataataaaaccgatcggatacgcatgaggct

SEQ ID NO: 4709 - DNA, 146 bp, Artificial Sequence
  Bisulfite Padlock Probe
  misc_feature 94, 95, 96, 97, 98, 99: n = A,T,C or G
gactggaagagcactgttccctctcgaaaaccaccaaaacaactcgttggaggctcatcgttcctattcaggcagatgttatcgaggtccgacnnnnnnaaaatcttaacgcgctccacaaataccgatcggatacgcatgaggct

SEQ ID NO: 4710 - DNA, 146 bp, Artificial Sequence
  Bisulfite Padlock Probe
  misc_feature 94, 95, 96, 97, 98, 99: n = A,T,C or G
gactggaagagcactgttccctctcgaaaaccaccgaaacaactcgttggaggctcatcgttcctattcaggcagatgttatcgaggtccgacnnnnnnaaaatcttaacgcgctccgcaaataccgatcggatacgcatgaggct

SEQ ID NO: 4711 - DNA, 146 bp, Artificial Sequence
  Bisulfite Padlock Probe
  misc_feature 95, 96, 97, 98, 99, 100: n = A,T,C or G
gactggaagagcactgttcccttatcccgaactaaaacacaaaaaagttggaggctcatcgttcctattcaggcagatgttatcgaggtccgacnnnnnncctccaaacatcccatccctcacttcgatcggatacgcatgaggct

SEQ ID NO: 4712 - DNA, 146 bp, Artificial Sequence
  Bisulfite Padlock Probe
  misc_feature 95, 96, 97, 98, 99, 100: n = A,T,C or G
gactggaagagcactgttcccttatcccgaactaaaacacgaaaaagttggaggctcatcgttcctattcaggcagatgttatcgaggtccgacnnnnnncctccgaacatcccatccctcacttcgatcggatacgcatgaggct

SEQ ID NO: 4713 - DNA, 146 bp, Artificial Sequence
  Bisulfite Padlock Probe
  misc_feature 94, 95, 96, 97, 98, 99: n = A,T,C or G
gactggaagagcactgttcccttcacaaaacctcttcttaaaatagttggaggctcatcgttcctattcaggcagatgttatcgaggtccgacnnnnnnaacgaaaaactctccctcacccaactcgatcggatacgcatgaggct

SEQ ID NO: 4714 - DNA, 146 bp, Artificial Sequence
  Bisulfite Padlock Probe
  misc_feature 94, 95, 96, 97, 98, 99: n = A,T,C or G
gactggaagagcactgttcccttcacaaaacctcttcttaaaatagttggaggctcatcgttcctattcaggcagatgttatcgaggtccgacnnnnnnaacgaaaaactctccctcgcccaactcgatcggatacgcatgaggct

SEQ ID NO: 4715 - DNA, 146 bp, Artificial Sequence
  Bisulfite Padlock Probe
  misc_feature 92, 93, 94, 95, 96, 97: n = A,T,C or G
gactggaagagcactgttcccttccaaaacccacaactaccaagttggaggctcatcgttcctattcaggcagatgttatcgaggtccgacnnnnnnaaccaaatatctcaaacgtacaacaaccagatcggatacgcatgaggct

SEQ ID NO: 4716 - DNA, 146 bp, Artificial Sequence
  Bisulfite Padlock Probe
  misc_feature 92, 93, 94, 95, 96, 97: n = A,T,C or G
gactggaagagcactgttcccttccaaaacccacaactaccaagttggaggctcatcgttcctattcaggcagatgttatcgaggtccgacnnnnnnaaccaaatatctcaaacgtacaacgaccagatcggatacgcatgaggct

SEQ ID NO: 4717 - DNA, 146 bp, Artificial Sequence
  Bisulfite Padlock Probe
  misc_feature 92, 93, 94, 95, 96, 97: n = A,T,C or G
gactggaagagcactgttcccttccaataccaaatctacatacgttggaggctcatcgttcctattcaggcagatgttatcgaggtccgacnnnnnncaaatccacccaaactttaacaacctaccgatcggatacgcatgaggct

SEQ ID NO: 4718 - DNA, 146 bp, Artificial Sequence
  Bisulfite Padlock Probe
  misc_feature 92, 93, 94, 95, 96, 97: n = A,T,C or G
gactggaagagcactgttcccttccaataccgaatctacatacgttggaggctcatcgttcctattcaggcagatgttatcgaggtccgacnnnnnncaaatccacccgaactttaacaacctaccgatcggatacgcatgaggct

SEQ ID NO: 4719 - DNA, 146 bp, Artificial Sequence
  Bisulfite Padlock Probe
  misc_feature 92, 93, 94, 95, 96, 97: n = A,T,C or G
gactggaagagcactgttcccttccccacaattcttttaaaaagttggaggctcatcgttcctattcaggcagatgttatcgaggtccgacnnnnnnaaacgaaaacgacccccaaaatttaactcgatcggatacgcatgaggct

SEQ ID NO: 4720 - DNA, 146 bp, Artificial Sequence
  Bisulfite Padlock Probe
  misc_feature 92, 93, 94, 95, 96, 97: n = A,T,C or G
gactggaagagcactgttcccttccccacaattcttttaaaaagttggaggctcatcgttcctattcaggcagatgttatcgaggtccgacnnnnnnaaacgaaaacgacccccgaaatttaactcgatcggatacgcatgaggct

SEQ ID NO: 4721 - DNA, 146 bp, Artificial Sequence
  Bisulfite Padlock Probe
  misc_feature 92, 93, 94, 95, 96, 97: n = A,T,C or G
gactggaagagcactgttcccttttccccactccgcaattaacgttggaggctcatcgttcctattcaggcagatgttatcgaggtccgacnnnnnnaaaccgaattcaaatccaatctcctccccgatcggatacgcatgaggct

SEQ ID NO: 4722 - DNA, 146 bp, Artificial Sequence
  Bisulfite Padlock Probe
  misc_feature 92, 93, 94, 95, 96, 97: n = A,T,C or G
gactggaagagcactgttcccttttccccactccgcgattaacgttggaggctcatcgttcctattcaggcagatgttatcgaggtccgacnnnnnnaaaccgaattcgaatccaatctcctccccgatcggatacgcatgaggct

SEQ ID NO: 4723 - DNA, 146 bp, Artificial Sequence
  Bisulfite Padlock Probe
  misc_feature 92, 93, 94, 95, 96, 97: n = A,T,C or G
gactggaagagcactgttccgaaaaacacattcctcctcaaccgttggaggctcatcgttcctattcaggcagatgttatcgaggtccgacnnnnnnacactaacatatttcttatcccccataatgatcggatacgcatgaggct

SEQ ID NO: 4724 - DNA, 146 bp, Artificial Sequence
  Bisulfite Padlock Probe
  misc_feature 92, 93, 94, 95, 96, 97: n = A,T,C or G
gactggaagagcactgttccgaaaaacgcattcctcctcaaccgttggaggctcatcgttcctattcaggcagatgttatcgaggtccgacnnnnnnacactaacatatttcttatcccccataatgatcggatacgcatgaggct

SEQ ID NO: 4725 - DNA, 146 bp, Artificial Sequence
  Bisulfite Padlock Probe
  misc_feature 93, 94, 95, 96, 97, 98: n = A,T,C or G
gactggaagagcactgttccgaaaaccgaacaacgacgaacaacgttggaggctcatcgttcctattcaggcagatgttatcgaggtccgacnnnnnnaccaacaaaaactatattcctaaactccgatcggatacgcatgaggct

SEQ ID NO: 4726 - DNA, 146 bp, Artificial Sequence
  Bisulfite Padlock Probe
  misc_feature 93, 94, 95, 96, 97, 98: n = A,T,C or G
gactggaagagcactgttccgaaaaccgaacaacgacgaacgacgttggaggctcatcgttcctattcaggcagatgttatcgaggtccgacnnnnnnaccaacgaaaactatattcctaaactccgatcggatacgcatgaggct

SEQ ID NO: 4727 - DNA, 146 bp, Artificial Sequence
  Bisulfite Padlock Probe
  misc_feature 95, 96, 97, 98, 99, 100: n = A,T,C or G
gactggaagagcactgttccgaaaaccgcgaaaacgaaacaaaaaagttggaggctcatcgttcctattcaggcagatgttatcgaggtccgacnnnnnnaacaaacaactcactctccctcacccgatcggatacgcatgaggct

SEQ ID NO: 4728 - DNA, 146 bp, Artificial Sequence
  Bisulfite Padlock Probe
  misc_feature 95, 96, 97, 98, 99, 100: n = A,T,C or G
gactggaagagcactgttccgaaaaccgcgaaaacgaaacgaaaaagttggaggctcatcgttcctattcaggcagatgttatcgaggtccgacnnnnnnaacgaacaactcactctccctcacccgatcggatacgcatgaggct

SEQ ID NO: 4729 - DNA, 146 bp, Artificial Sequence
  Bisulfite Padlock Probe
  misc_feature 94, 95, 96, 97, 98, 99: n = A,T,C or G
gactggaagagcactgttccgaaaatcccgactaacgaccaaacagttggaggctcatcgttcctattcaggcagatgttatcgaggtccgacnnnnnnccttttatacgaaaacttccaccctacgatcggatacgcatgaggct

SEQ ID NO: 4730 - DNA, 146 bp, Artificial Sequence
  Bisulfite Padlock Probe
  misc_feature 94, 95, 96, 97, 98, 99: n = A,T,C or G
gactggaagagcactgttccgaaaatcccgactaacgaccgaacagttggaggctcatcgttcctattcaggcagatgttatcgaggtccgacnnnnnnccttttatacgaaaacttccgccctacgatcggatacgcatgaggct

SEQ ID NO: 4731 - DNA, 146 bp, Artificial Sequence
  Bisulfite Padlock Probe
  misc_feature 95, 96, 97, 98, 99, 100: n = A,T,C or G
gactggaagagcactgttccgaaacccgccacaaactaaaataaccgttggaggctcatcgttcctattcaggcagatgttatcgaggtccgacnnnnnncatccctcgaaaccacatacaaactcgatcggatacgcatgaggct

SEQ ID NO: 4732 - DNA, 146 bp, Artificial Sequence
  Bisulfite Padlock Probe
  misc_feature 95, 96, 97, 98, 99, 100: n = A,T,C or G
gactggaagagcactgttccgaaacccgccgcaaactaaaataaccgttggaggctcatcgttcctattcaggcagatgttatcgaggtccgacnnnnnncatccctcgaaaccacgtacaaactcgatcggatacgcatgaggct

SEQ ID NO: 4733 - DNA, 146 bp, Artificial Sequence
  Bisulfite Padlock Probe
  misc_feature 96, 97, 98, 99, 100, 101: n = A,T,C or G
gactggaagagcactgttccgaaacctacgaacataaactcaaaaaagttggaggctcatcgttcctattcaggcagatgttatcgaggtccgacnnnnnnaaaaactaaacgaccgccataaaaagatcggatacgcatgaggct

SEQ ID NO: 4734 - DNA, 146 bp, Artificial Sequence
  Bisulfite Padlock Probe
  misc_feature 96, 97, 98, 99, 100, 101: n = A,T,C or G
gactggaagagcactgttccgaaacctacgaacataaactcgaaaaagttggaggctcatcgttcctattcaggcagatgttatcgaggtccgacnnnnnnaaaaactaaacgaccgccgtaaaaagatcggatacgcatgaggct

SEQ ID NO: 4735 - DNA, 146 bp, Artificial Sequence
  Bisulfite Padlock Probe
  misc_feature 96, 97, 98, 99, 100, 101: n = A,T,C or G
gactggaagagcactgttccgaaacgtacaacgcgaaatcctaacaagttggaggctcatcgttcctattcaggcagatgttatcgaggtccgacnnnnnntcgaaacgtccccaaacccaaaaacgatcggatacgcatgaggct

SEQ ID NO: 4736 - DNA, 146 bp, Artificial Sequence
  Bisulfite Padlock Probe
  misc_feature 96, 97, 98, 99, 100, 101: n = A,T,C or G
gactggaagagcactgttccgaaacgtacaacgcgaaatcctaacgagttggaggctcatcgttcctattcaggcagatgttatcgaggtccgacnnnnnntcgaaacgtccccgaacccaaaaacgatcggatacgcatgaggct

SEQ ID NO: 4737 - DNA, 146 bp, Artificial Sequence
  Bisulfite Padlock Probe
  misc_feature 92, 93, 94, 95, 96, 97: n = A,T,C or G
gactggaagagcactgttccgaaactaaatttaaattttaaacgttggaggctcatcgttcctattcaggcagatgttatcgaggtccgacnnnnnnctctaaccttataatctaataaatatacggatcggatacgcatgaggct

SEQ ID NO: 4738 - DNA, 146 bp, Artificial Sequence
  Bisulfite Padlock Probe
  misc_feature 94, 95, 96, 97, 98, 99: n = A,T,C or G
gactggaagagcactgttccgaaataaacgcacataaccaaaaaagttggaggctcatcgttcctattcaggcagatgttatcgaggtccgacnnnnnnttattttctaaaccaacccgcccactcgatcggatacgcatgaggct

SEQ ID NO: 4739 - DNA, 146 bp, Artificial Sequence
  Bisulfite Padlock Probe
  misc_feature 94, 95, 96, 97, 98, 99: n = A,T,C or G
gactggaagagcactgttccgaaataaacgcacataaccgaaaaagttggaggctcatcgttcctattcaggcagatgttatcgaggtccgacnnnnnnttattttctaaaccaacccgcccgctcgatcggatacgcatgaggct

SEQ ID NO: 4740 - DNA, 146 bp, Artificial Sequence
  Bisulfite Padlock Probe
  misc_feature 92, 93, 94, 95, 96, 97: n = A,T,C or G
gactggaagagcactgttccgaaatcctccaatccccaaaaccgttggaggctcatcgttcctattcaggcagatgttatcgaggtccgacnnnnnntccaaaccctaactacctaaacgccaattgatcggatacgcatgaggct

SEQ ID NO: 4741 - DNA, 146 bp, Artificial Sequence
  Bisulfite Padlock Probe
  misc_feature 92, 93, 94, 95, 96, 97: n = A,T,C or G
gactggaagagcactgttccgaaatcctccaatccccgaaaccgttggaggctcatcgttcctattcaggcagatgttatcgaggtccgacnnnnnntccaaaccctaactacctaaacgccgattgatcggatacgcatgaggct

SEQ ID NO: 4742 - DNA, 146 bp, Artificial Sequence
  Bisulfite Padlock Probe
  misc_feature 94, 95, 96, 97, 98, 99: n = A,T,C or G
gactggaagagcactgttccgaaattaaccaaatatacttaaaaagttggaggctcatcgttcctattcaggcagatgttatcgaggtccgacnnnnnnaaaaaccgaaccccgaaaataacgatagatcggatacgcatgaggct

SEQ ID NO: 4743 - DNA, 146 bp, Artificial Sequence
  Bisulfite Padlock Probe
  misc_feature 95, 96, 97, 98, 99, 100: n = A,T,C or G
gactggaagagcactgttccgaaattatcataacaacaactccatcgttggaggctcatcgttcctattcaggcagatgttatcgaggtccgacnnnnnncaaaaactacgacgataaccgaaaaagatcggatacgcatgaggct

SEQ ID NO: 4744 - DNA, 146 bp, Artificial Sequence
  Bisulfite Padlock Probe
  misc_feature 96, 97, 98, 99, 100, 101: n = A,T,C or G
gactggaagagcactgttccgaacatatatatatatctatatatatagttggaggctcatcgttcctattcaggcagatgttatcgaggtccgacnnnnnnaatcaaattttaacaaatactttccgatcggatacgcatgaggct

SEQ ID NO: 4745 - DNA, 146 bp, Artificial Sequence
  Bisulfite Padlock Probe
  misc_feature 92, 93, 94, 95, 96, 97: n = A,T,C or G
gactggaagagcactgttccgaaccaaaaacaatacaaacctcgttggaggctcatcgttcctattcaggcagatgttatcgaggtccgacnnnnnnaaaaatcgtcgaaaacgaaacccctaaaagatcggatacgcatgaggct

SEQ ID NO: 4746 - DNA, 146 bp, Artificial Sequence
  Bisulfite Padlock Probe
  misc_feature 96, 97, 98, 99, 100, 101: n = A,T,C or G
gactggaagagcactgttccgaacccacaaaaaacaacaaacacaacgttggaggctcatcgttcctattcaggcagatgttatcgaggtccgacnnnnnncaaaacgctcacctcccacaacaaagatcggatacgcatgaggct

SEQ ID NO: 4747 - DNA, 146 bp, Artificial Sequence
  Bisulfite Padlock Probe
  misc_feature 96, 97, 98, 99, 100, 101: n = A,T,C or G
gactggaagagcactgttccgaacccacgaaaaacaacaaacacaacgttggaggctcatcgttcctattcaggcagatgttatcgaggtccgacnnnnnncaaaacgctcacctcccgcaacaaagatcggatacgcatgaggct

SEQ ID NO: 4748 - DNA, 146 bp, Artificial Sequence
  Bisulfite Padlock Probe
  misc_feature 93, 94, 95, 96, 97, 98: n = A,T,C or G
gactggaagagcactgttccgaatacgtcccgacaaacacaaacgttggaggctcatcgttcctattcaggcagatgttatcgaggtccgacnnnnnnctacaaacataaatactaaacactctttgatcggatacgcatgaggct

SEQ ID NO: 4749 - DNA, 146 bp, Artificial Sequence
  Bisulfite Padlock Probe
  misc_feature 93, 94, 95, 96, 97, 98: n = A,T,C or G
gactggaagagcactgttccgaatacgtcccgacgaacacaaacgttggaggctcatcgttcctattcaggcagatgttatcgaggtccgacnnnnnnctacaaacgtaaatactaaacactctttgatcggatacgcatgaggct

SEQ ID NO: 4750 - DNA, 146 bp, Artificial Sequence
  Bisulfite Padlock Probe
  misc_feature 93, 94, 95, 96, 97, 98: n = A,T,C or G
gactggaagagcactgttccgaatttaaatcttaaaattaaaaagttggaggctcatcgttcctattcaggcagatgttatcgaggtccgacnnnnnnaaacgaaccacgtttaatctccgaacccgatcggatacgcatgaggct

SEQ ID NO: 4751 - DNA, 146 bp, Artificial Sequence
  Bisulfite Padlock Probe
  misc_feature 92, 93, 94, 95, 96, 97: n = A,T,C or G
gactggaagagcactgttccgacaaaaactaacaaacccaaaagttggaggctcatcgttcctattcaggcagatgttatcgaggtccgacnnnnnnccctcaactacccctcaaaaaccgttattgatcggatacgcatgaggct

SEQ ID NO: 4752 - DNA, 146 bp, Artificial Sequence
  Bisulfite Padlock Probe
  misc_feature 92, 93, 94, 95, 96, 97: n = A,T,C or G
gactggaagagcactgttccgaccaacgaccaaaaatatccccgttggaggctcatcgttcctattcaggcagatgttatcgaggtccgacnnnnnntcccctaaaattaaaaatccaaaacccacgatcggatacgcatgaggct

SEQ ID NO: 4753 - DNA, 146 bp, Artificial Sequence
  Bisulfite Padlock Probe
  misc_feature 92, 93, 94, 95, 96, 97: n = A,T,C or G
gactggaagagcactgttccgaccaacgaccgaaaatatccccgttggaggctcatcgttcctattcaggcagatgttatcgaggtccgacnnnnnntcccctaaaattaaaaatccgaaacccacgatcggatacgcatgaggct

SEQ ID NO: 4754 - DNA, 146 bp, Artificial Sequence
  Bisulfite Padlock Probe
  misc_feature 93, 94, 95, 96, 97, 98: n = A,T,C or G
gactggaagagcactgttccgacccgtaaaaacgtaaacaacccgttggaggctcatcgttcctattcaggcagatgttatcgaggtccgacnnnnnnaaaacgatacctccgaaaaacaaaccaagatcggatacgcatgaggct

SEQ ID NO: 4755 - DNA, 146 bp, Artificial Sequence
  Bisulfite Padlock Probe
  misc_feature 93, 94, 95, 96, 97, 98: n = A,T,C or G
gactggaagagcactgttccgacccgtaaaaacgtaaacgacccgttggaggctcatcgttcctattcaggcagatgttatcgaggtccgacnnnnnnaaaacgatacctccgaaaaacaaaccgagatcggatacgcatgaggct

SEQ ID NO: 4756 - DNA, 146 bp, Artificial Sequence
  Bisulfite Padlock Probe
  misc_feature 92, 93, 94, 95, 96, 97: n = A,T,C or G
gactggaagagcactgttccgaccgaccataaaacgcataaccgttggaggctcatcgttcctattcaggcagatgttatcgaggtccgacnnnnnnaaaaacaacgacgctccaaaacacaaaatgatcggatacgcatgaggct

SEQ ID NO: 4757 - DNA, 146 bp, Artificial Sequence
  Bisulfite Padlock Probe
  misc_feature 92, 93, 94, 95, 96, 97: n = A,T,C or G
gactggaagagcactgttccgaccgaccataaaacgcgtaaccgttggaggctcatcgttcctattcaggcagatgttatcgaggtccgacnnnnnnaaaaacaacgacgctccgaaacacaaaatgatcggatacgcatgaggct

SEQ ID NO: 4758 - DNA, 146 bp, Artificial Sequence
  Bisulfite Padlock Probe
  misc_feature 95, 96, 97, 98, 99, 100: n = A,T,C or G
gactggaagagcactgttccgactaaccaaaactcaaaaatcccccgttggaggctcatcgttcctattcaggcagatgttatcgaggtccgacnnnnnnaccccaaaacacaaaatactcaaaccgatcggatacgcatgaggct

SEQ ID NO: 4759 - DNA, 146 bp, Artificial Sequence
  Bisulfite Padlock Probe
  misc_feature 95, 96, 97, 98, 99, 100: n = A,T,C or G
gactggaagagcactgttccgactaaccgaaactcaaaaatcccccgttggaggctcatcgttcctattcaggcagatgttatcgaggtccgacnnnnnnaccccaaaacgcaaaatactcaaaccgatcggatacgcatgaggct

SEQ ID NO: 4760 - DNA, 146 bp, Artificial Sequence
  Bisulfite Padlock Probe
  misc_feature 94, 95, 96, 97, 98, 99: n = A,T,C or G
gactggaagagcactgttccgactcgaaccaatcaaaaataaaaagttggaggctcatcgttcctattcaggcagatgttatcgaggtccgacnnnnnnaacaaacaaaacccaaaccaaaaactagatcggatacgcatgaggct

SEQ ID NO: 4761 - DNA, 146 bp, Artificial Sequence
  Bisulfite Padlock Probe
  misc_feature 94, 95, 96, 97, 98, 99: n = A,T,C or G
gactggaagagcactgttccgactcgaaccgatcaaaaataaaaagttggaggctcatcgttcctattcaggcagatgttatcgaggtccgacnnnnnnaacaaacaaaacccgaaccaaaaactagatcggatacgcatgaggct

SEQ ID NO: 4762 - DNA, 146 bp, Artificial Sequence
  Bisulfite Padlock Probe
  misc_feature 92, 93, 94, 95, 96, 97: n = A,T,C or G
gactggaagagcactgttccgatacaatctataatctacccttgttggaggctcatcgttcctattcaggcagatgttatcgaggtccgacnnnnnnataccacgaataaactcaccaaaaacctagatcggatacgcatgaggct

SEQ ID NO: 4763 - DNA, 146 bp, Artificial Sequence
  Bisulfite Padlock Probe
  misc_feature 92, 93, 94, 95, 96, 97: n = A,T,C or G
gactggaagagcactgttccgatccccgataactacacttcccgttggaggctcatcgttcctattcaggcagatgttatcgaggtccgacnnnnnnctacccgaaaacgccacaaacctaaattcgatcggatacgcatgaggct

SEQ ID NO: 4764 - DNA, 146 bp, Artificial Sequence
  Bisulfite Padlock Probe
  misc_feature 92, 93, 94, 95, 96, 97: n = A,T,C or G
gactggaagagcactgttccgatccccgataactacgcttcccgttggaggctcatcgttcctattcaggcagatgttatcgaggtccgacnnnnnnctacccgaaaacgccgcaaacctaaattcgatcggatacgcatgaggct

SEQ ID NO: 4765 - DNA, 146 bp, Artificial Sequence
  Bisulfite Padlock Probe
  misc_feature 93, 94, 95, 96, 97, 98: n = A,T,C or G
gactggaagagcactgttccgattacgcgaaccgacactaatacgttggaggctcatcgttcctattcaggcagatgttatcgaggtccgacnnnnnngaaaccgcctcgaaaacactaccaaaaagatcggatacgcatgaggct

SEQ ID NO: 4766 - DNA, 146 bp, Artificial Sequence
  Bisulfite Padlock Probe
  misc_feature 93, 94, 95, 96, 97, 98: n = A,T,C or G
gactggaagagcactgttccgattacgcgaaccgacgctaatacgttggaggctcatcgttcctattcaggcagatgttatcgaggtccgacnnnnnngaaaccgcctcgaaaacgctaccaaaaagatcggatacgcatgaggct

SEQ ID NO: 4767 - DNA, 146 bp, Artificial Sequence
  Bisulfite Padlock Probe
  misc_feature 96, 97, 98, 99, 100, 101: n = A,T,C or G
gactggaagagcactgttccgcaaaaaccattatattactaacccacgttggaggctcatcgttcctattcaggcagatgttatcgaggtccgacnnnnnnaccctactccaacccctaaacaaccgatcggatacgcatgaggct

SEQ ID NO: 4768 - DNA, 146 bp, Artificial Sequence
  Bisulfite Padlock Probe
  misc_feature 96, 97, 98, 99, 100, 101: n = A,T,C or G
gactggaagagcactgttccgcaaaaaccgttatattactaacccacgttggaggctcatcgttcctattcaggcagatgttatcgaggtccgacnnnnnnaccctactccaacccctaaacgaccgatcggatacgcatgaggct

SEQ ID NO: 4769 - DNA, 146 bp, Artificial Sequence
  Bisulfite Padlock Probe
  misc_feature 93, 94, 95, 96, 97, 98: n = A,T,C or G
gactggaagagcactgttccgcaaaaatcctcactccaccaatcgttggaggctcatcgttcctattcaggcagatgttatcgaggtccgacnnnnnncgcaaaacccaccaaaacttcccaaaaagatcggatacgcatgaggct

SEQ ID NO: 4770 - DNA, 146 bp, Artificial Sequence
  Bisulfite Padlock Probe
  misc_feature 93, 94, 95, 96, 97, 98: n = A,T,C or G
gactggaagagcactgttccgcaaaaatcctcactccgccaatcgttggaggctcatcgttcctattcaggcagatgttatcgaggtccgacnnnnnncgcaaaacccaccgaaacttcccaaaaagatcggatacgcatgaggct

SEQ ID NO: 4771 - DNA, 146 bp, Artificial Sequence
  Bisulfite Padlock Probe
  misc_feature 92, 93, 94, 95, 96, 97: n = A,T,C or G
gactggaagagcactgttccgcaacctcaacccactatccaaagttggaggctcatcgttcctattcaggcagatgttatcgaggtccgacnnnnnngactacgaacccgaaaaacctcccaaaacgatcggatacgcatgaggct

SEQ ID NO: 4772 - DNA, 146 bp, Artificial Sequence
  Bisulfite Padlock Probe
  misc_feature 92, 93, 94, 95, 96, 97: n = A,T,C or G
gactggaagagcactgttccgcattaactcttctaactcacctgttggaggctcatcgttcctattcaggcagatgttatcgaggtccgacnnnnnnaaacaataactcccctcatcacaaaactcgatcggatacgcatgaggct

SEQ ID NO: 4773 - DNA, 146 bp, Artificial Sequence
  Bisulfite Padlock Probe
  misc_feature 92, 93, 94, 95, 96, 97: n = A,T,C or G
gactggaagagcactgttccgcattaactcttctaactcgcctgttggaggctcatcgttcctattcaggcagatgttatcgaggtccgacnnnnnnaaacgataactcccctcatcacaaaactcgatcggatacgcatgaggct

SEQ ID NO: 4774 - DNA, 146 bp, Artificial Sequence
  Bisulfite Padlock Probe
  misc_feature 96, 97, 98, 99, 100, 101: n = A,T,C or G
gactggaagagcactgttccgccaaaactactactactacaactaccgttggaggctcatcgttcctattcaggcagatgttatcgaggtccgacnnnnnncgctcgaaaccgaccaaccaaaaaagatcggatacgcatgaggct

SEQ ID NO: 4775 - DNA, 146 bp, Artificial Sequence
  Bisulfite Padlock Probe
  misc_feature 92, 93, 94, 95, 96, 97: n = A,T,C or G
gactggaagagcactgttccgccaatcgactaaacatcaaaacgttggaggctcatcgttcctattcaggcagatgttatcgaggtccgacnnnnnnctcaactttctaactctctccccaaatacgatcggatacgcatgaggct

SEQ ID NO: 4776 - DNA, 146 bp, Artificial Sequence
  Bisulfite Padlock Probe
  misc_feature 92, 93, 94, 95, 96, 97: n = A,T,C or G
gactggaagagcactgttccgccaatcgactaaacgtcaaaacgttggaggctcatcgttcctattcaggcagatgttatcgaggtccgacnnnnnnctcaactttctaactctctccccgaatacgatcggatacgcatgaggct

SEQ ID NO: 4777 - DNA, 146 bp, Artificial Sequence
  Bisulfite Padlock Probe
  misc_feature 93, 94, 95, 96, 97, 98: n = A,T,C or G
gactggaagagcactgttccgccaccaccacctaatcaacctacgttggaggctcatcgttcctattcaggcagatgttatcgaggtccgacnnnnnnaccgtcacaaaccccgacgaactataaagatcggatacgcatgaggct

SEQ ID NO: 4778 - DNA, 146 bp, Artificial Sequence
  Bisulfite Padlock Probe
  misc_feature 96, 97, 98, 99, 100, 101: n = A,T,C or G
gactggaagagcactgttccgccgaaactactactactacaactaccgttggaggctcatcgttcctattcaggcagatgttatcgaggtccgacnnnnnncgctcgaaaccgaccaaccgaaaaagatcggatacgcatgaggct

SEQ ID NO: 4779 - DNA, 146 bp, Artificial Sequence
  Bisulfite Padlock Probe
  misc_feature 93, 94, 95, 96, 97, 98: n = A,T,C or G
gactggaagagcactgttccgccgaataaaaaccaaaaaccaaagttggaggctcatcgttcctattcaggcagatgttatcgaggtccgacnnnnnnccctaaaatacaccgcgacgcaatactcgatcggatacgcatgaggct

SEQ ID NO: 4780 - DNA, 146 bp, Artificial Sequence
  Bisulfite Padlock Probe
  misc_feature 93, 94, 95, 96, 97, 98: n = A,T,C or G
gactggaagagcactgttccgccgaataaaaaccgaaaaccaaagttggaggctcatcgttcctattcaggcagatgttatcgaggtccgacnnnnnnccctaaaatacaccgcgacgcgatactcgatcggatacgcatgaggct

SEQ ID NO: 4781 - DNA, 146 bp, Artificial Sequence
  Bisulfite Padlock Probe
  misc_feature 92, 93, 94, 95, 96, 97: n = A,T,C or G
gactggaagagcactgttccgccgccgctcacaataataaaaagttggaggctcatcgttcctattcaggcagatgttatcgaggtccgacnnnnnnaaaaccttaaccttaaccttactcttaccgatcggatacgcatgaggct

SEQ ID NO: 4782 - DNA, 146 bp, Artificial Sequence
  Bisulfite Padlock Probe
  misc_feature 92, 93, 94, 95, 96, 97: n = A,T,C or G
gactggaagagcactgttccgccgccgctcgcaataataaaaagttggaggctcatcgttcctattcaggcagatgttatcgaggtccgacnnnnnnaaaaccttaaccttaaccttactcttaccgatcggatacgcatgaggct

SEQ ID NO: 4783 - DNA, 146 bp, Artificial Sequence
  Bisulfite Padlock Probe
  misc_feature 93, 94, 95, 96, 97, 98: n = A,T,C or G
gactggaagagcactgttccgccgtctaccaccacctataaaaagttggaggctcatcgttcctattcaggcagatgttatcgaggtccgacnnnnnnaccaaacgaactacaaaacaatatactagatcggatacgcatgaggct

SEQ ID NO: 4784 - DNA, 146 bp, Artificial Sequence
  Bisulfite Padlock Probe
  misc_feature 93, 94, 95, 96, 97, 98: n = A,T,C or G
gactggaagagcactgttccgccgtctaccgccacctataaaaagttggaggctcatcgttcctattcaggcagatgttatcgaggtccgacnnnnnnaccaaacgaactacaaaacgatatactagatcggatacgcatgaggct

SEQ ID NO: 4785 - DNA, 146 bp, Artificial Sequence
  Bisulfite Padlock Probe
  misc_feature 93, 94, 95, 96, 97, 98: n = A,T,C or G
gactggaagagcactgttccgccgtcttctctaaaacacaaaaagttggaggctcatcgttcctattcaggcagatgttatcgaggtccgacnnnnnnacacaaaaaccaaaaattcccaaaaaccgatcggatacgcatgaggct

SEQ ID NO: 4786 - DNA, 146 bp, Artificial Sequence
  Bisulfite Padlock Probe
  misc_feature 93, 94, 95, 96, 97, 98: n = A,T,C or G
gactggaagagcactgttccgccgtcttctctaaaacgcaaaaagttggaggctcatcgttcctattcaggcagatgttatcgaggtccgacnnnnnnacacaaaaaccaaaaattcccgaaaaccgatcggatacgcatgaggct

SEQ ID NO: 4787 - DNA, 146 bp, Artificial Sequence
  Bisulfite Padlock Probe
  misc_feature 92, 93, 94, 95, 96, 97: n = A,T,C or G
gactggaagagcactgttccgcctaatttctttaacccaactcgttggaggctcatcgttcctattcaggcagatgttatcgaggtccgacnnnnnnaacgaaaatcactaaaccaccccaaaaccgatcggatacgcatgaggct

SEQ ID NO: 4788 - DNA, 146 bp, Artificial Sequence
  Bisulfite Padlock Probe
  misc_feature 94, 95, 96, 97, 98, 99: n = A,T,C or G
gactggaagagcactgttccgcctcacctacaaaactcaaaacctgttggaggctcatcgttcctattcaggcagatgttatcgaggtccgacnnnnnnaatacgaaaactatcgacaacctcaacgatcggatacgcatgaggct

SEQ ID NO: 4789 - DNA, 146 bp, Artificial Sequence
  Bisulfite Padlock Probe
  misc_feature 94, 95, 96, 97, 98, 99: n = A,T,C or G
gactggaagagcactgttccgcctcacctacgaaactcaaaacctgttggaggctcatcgttcctattcaggcagatgttatcgaggtccgacnnnnnnaatacgaaaactatcgacaacctcgacgatcggatacgcatgaggct

SEQ ID NO: 4790 - DNA, 146 bp, Artificial Sequence
  Bisulfite Padlock Probe
  misc_feature 93, 94, 95, 96, 97, 98: n = A,T,C or G
gactggaagagcactgttccgcctccaaacaacaaaaactcaacgttggaggctcatcgttcctattcaggcagatgttatcgaggtccgacnnnnnnaaaaacaaaaatttacaaaaacaacaaagatcggatacgcatgaggct

SEQ ID NO: 4791 - DNA, 146 bp, Artificial Sequence
  Bisulfite Padlock Probe
  misc_feature 93, 94, 95, 96, 97, 98: n = A,T,C or G
gactggaagagcactgttccgcctccaaacgacaaaaactcaacgttggaggctcatcgttcctattcaggcagatgttatcgaggtccgacnnnnnnaaaaacaaaaatttacaaaaacaacgaagatcggatacgcatgaggct

SEQ ID NO: 4792 - DNA, 146 bp, Artificial Sequence
  Bisulfite Padlock Probe
  misc_feature 92, 93, 94, 95, 96, 97: n = A,T,C or G
gactggaagagcactgttccgcgaactaaaaccccaaaccaatgttggaggctcatcgttcctattcaggcagatgttatcgaggtccgacnnnnnnaaaaacacgacctaacgaaaccaccctaagatcggatacgcatgaggct

SEQ ID NO: 4793 - DNA, 146 bp, Artificial Sequence
  Bisulfite Padlock Probe
  misc_feature 92, 93, 94, 95, 96, 97: n = A,T,C or G
gactggaagagcactgttccgcgaactaaaaccccgaaccaatgttggaggctcatcgttcctattcaggcagatgttatcgaggtccgacnnnnnnaaaaacacgacctaacgaaaccgccctaagatcggatacgcatgaggct

SEQ ID NO: 4794 - DNA, 146 bp, Artificial Sequence
  Bisulfite Padlock Probe
  misc_feature 92, 93, 94, 95, 96, 97: n = A,T,C or G
gactggaagagcactgttccgcgaccaaacctaacccaaaaaagttggaggctcatcgttcctattcaggcagatgttatcgaggtccgacnnnnnnctctttatctcctacacgaaaaccatcccgatcggatacgcatgaggct

SEQ ID NO: 4795 - DNA, 146 bp, Artificial Sequence
  Bisulfite Padlock Probe
  misc_feature 92, 93, 94, 95, 96, 97: n = A,T,C or G
gactggaagagcactgttccgcgaccaaacctaacccgaaaaagttggaggctcatcgttcctattcaggcagatgttatcgaggtccgacnnnnnnctctttatctcctacacgaaaaccgtcccgatcggatacgcatgaggct

SEQ ID NO: 4796 - DNA, 146 bp, Artificial Sequence
  Bisulfite Padlock Probe
  misc_feature 92, 93, 94, 95, 96, 97: n = A,T,C or G
gactggaagagcactgttccgcgacctcaacccactatccaaagttggaggctcatcgttcctattcaggcagatgttatcgaggtccgacnnnnnngactacgaacccgaaaaacctcccgaaacgatcggatacgcatgaggct

SEQ ID NO: 4797 - DNA, 146 bp, Artificial Sequence
  Bisulfite Padlock Probe
  misc_feature 94, 95, 96, 97, 98, 99: n = A,T,C or G
gactggaagagcactgttccgcgatactaacgttaaaaacaacccgttggaggctcatcgttcctattcaggcagatgttatcgaggtccgacnnnnnncgactatactaaacccccacctaactcgatcggatacgcatgaggct

SEQ ID NO: 4798 - DNA, 146 bp, Artificial Sequence
  Bisulfite Padlock Probe
  misc_feature 94, 95, 96, 97, 98, 99: n = A,T,C or G
gactggaagagcactgttccgcgatactaacgttaaaaacgacccgttggaggctcatcgttcctattcaggcagatgttatcgaggtccgacnnnnnncgactatactaaacccccgcctaactcgatcggatacgcatgaggct

SEQ ID NO: 4799 - DNA, 146 bp, Artificial Sequence
  Bisulfite Padlock Probe
  misc_feature 94, 95, 96, 97, 98, 99: n = A,T,C or G
gactggaagagcactgttccgcgatataaaacgacgccaaacaacgttggaggctcatcgttcctattcaggcagatgttatcgaggtccgacnnnnnnaacgacgacacaaacactctataaaaagatcggatacgcatgaggct

SEQ ID NO: 4800 - DNA, 146 bp, Artificial Sequence
  Bisulfite Padlock Probe
  misc_feature 94, 95, 96, 97, 98, 99: n = A,T,C or G
gactggaagagcactgttccgcgatataaaacgacgccgaacaacgttggaggctcatcgttcctattcaggcagatgttatcgaggtccgacnnnnnnaacgacgacgcaaacactctataaaaagatcggatacgcatgaggct

SEQ ID NO: 4801 - DNA, 146 bp, Artificial Sequence
  Bisulfite Padlock Probe
  misc_feature 92, 93, 94, 95, 96, 97: n = A,T,C or G
gactggaagagcactgttccgctaccacaaacctcctctactagttggaggctcatcgttcctattcaggcagatgttatcgaggtccgacnnnnnnaaaaacctcgaaaaaccgcaaataaactcgatcggatacgcatgaggct

SEQ ID NO: 4802 - DNA, 146 bp, Artificial Sequence
  Bisulfite Padlock Probe
  misc_feature 92, 93, 94, 95, 96, 97: n = A,T,C or G
gactggaagagcactgttccgctaccgcaaacctcctctactagttggaggctcatcgttcctattcaggcagatgttatcgaggtccgacnnnnnnaaaaacctcgaaaaaccgcgaataaactcgatcggatacgcatgaggct

SEQ ID NO: 4803 - DNA, 146 bp, Artificial Sequence
  Bisulfite Padlock Probe
  misc_feature 95, 96, 97, 98, 99, 100: n = A,T,C or G
gactggaagagcactgttccgctcgaaattcaaatacacaaacacagttggaggctcatcgttcctattcaggcagatgttatcgaggtccgacnnnnnntccctccgaaccgaaaacaaaactcagatcggatacgcatgaggct

SEQ ID NO: 4804 - DNA, 146 bp, Artificial Sequence
  Bisulfite Padlock Probe
  misc_feature 95, 96, 97, 98, 99, 100: n = A,T,C or G
gactggaagagcactgttccgctcgaaattcaaatacacgaacacagttggaggctcatcgttcctattcaggcagatgttatcgaggtccgacnnnnnntccctccgaaccgaaaacgaaactcagatcggatacgcatgaggct

SEQ ID NO: 4805 - DNA, 146 bp, Artificial Sequence
  Bisulfite Padlock Probe
  misc_feature 92, 93, 94, 95, 96, 97: n = A,T,C or G
gactggaagagcactgttccgtaaactaaaactaacccaaaacgttggaggctcatcgttcctattcaggcagatgttatcgaggtccgacnnnnnnaaaatcaaaccctataaccgtccactaccgatcggatacgcatgaggct

SEQ ID NO: 4806 - DNA, 146 bp, Artificial Sequence
  Bisulfite Padlock Probe
  misc_feature 92, 93, 94, 95, 96, 97: n = A,T,C or G
gactggaagagcactgttccgtaaactaaaactaacccgaaacgttggaggctcatcgttcctattcaggcagatgttatcgaggtccgacnnnnnnaaaatcaaaccctataaccgtccgctaccgatcggatacgcatgaggct

SEQ ID NO: 4807 - DNA, 146 bp, Artificial Sequence
  Bisulfite Padlock Probe
  misc_feature 95, 96, 97, 98, 99, 100: n = A,T,C or G
gactggaagagcactgttccgttaacaacttcttctcgcccaactcgttggaggctcatcgttcctattcaggcagatgttatcgaggtccgacnnnnnncaactaaaaacgaacgcgaccgcaacgatcggatacgcatgaggct

SEQ ID NO: 4808 - DNA, 146 bp, Artificial Sequence
  Bisulfite Padlock Probe
  misc_feature 95, 96, 97, 98, 99, 100: n = A,T,C or G
gactggaagagcactgttccgttaacaacttcttctcgcccgactcgttggaggctcatcgttcctattcaggcagatgttatcgaggtccgacnnnnnncaactaaaaacgaacgcgaccgcgacgatcggatacgcatgaggct

SEQ ID NO: 4809 - DNA, 146 bp, Artificial Sequence
  Bisulfite Padlock Probe
  misc_feature 93, 94, 95, 96, 97, 98: n = A,T,C or G
gactggaagagcactgttccgttactatctaataacaacttaaagttggaggctcatcgttcctattcaggcagatgttatcgaggtccgacnnnnnnaaaaatactcgcgaaaaacgcctaaaaagatcggatacgcatgaggct

SEQ ID NO: 4810 - DNA, 146 bp, Artificial Sequence
  Bisulfite Padlock Probe
  misc_feature 94, 95, 96, 97, 98, 99: n = A,T,C or G
gactggaagagcactgttcctaaaaacaaatacactaaactcaacgttggaggctcatcgttcctattcaggcagatgttatcgaggtccgacnnnnnnaacaaaaatcttaaaactaaatatattgatcggatacgcatgaggct

SEQ ID NO: 4811 - DNA, 146 bp, Artificial Sequence
  Bisulfite Padlock Probe
  misc_feature 92, 93, 94, 95, 96, 97: n = A,T,C or G
gactggaagagcactgttcctaaaaaccaacaaaaccaaatacgttggaggctcatcgttcctattcaggcagatgttatcgaggtccgacnnnnnnctacccaaatctctaactcctcatctctcgatcggatacgcatgaggct

SEQ ID NO: 4812 - DNA, 146 bp, Artificial Sequence
  Bisulfite Padlock Probe
  misc_feature 92, 93, 94, 95, 96, 97: n = A,T,C or G
gactggaagagcactgttcctaaaaaccgacaaaaccaaatacgttggaggctcatcgttcctattcaggcagatgttatcgaggtccgacnnnnnnctacccgaatctctaactcctcatctctcgatcggatacgcatgaggct

SEQ ID NO: 4813 - DNA, 146 bp, Artificial Sequence
  Bisulfite Padlock Probe
  misc_feature 95, 96, 97, 98, 99, 100: n = A,T,C or G
gactggaagagcactgttcctaaaaacgataaacactaaccaaaacgttggaggctcatcgttcctattcaggcagatgttatcgaggtccgacnnnnnnacctaacactcaaacctcaactccccgatcggatacgcatgaggct

SEQ ID NO: 4814 - DNA, 146 bp, Artificial Sequence
  Bisulfite Padlock Probe
  misc_feature 95, 96, 97, 98, 99, 100: n = A,T,C or G
gactggaagagcactgttcctaaaaacgataaacgctaaccaaaacgttggaggctcatcgttcctattcaggcagatgttatcgaggtccgacnnnnnnacctaacactcaaacctcgactccccgatcggatacgcatgaggct

SEQ ID NO: 4815 - DNA, 146 bp, Artificial Sequence
  Bisulfite Padlock Probe
  misc_feature 92, 93, 94, 95, 96, 97: n = A,T,C or G
gactggaagagcactgttcctaaaaactactccaaacgacaccgttggaggctcatcgttcctattcaggcagatgttatcgaggtccgacnnnnnnaactcactcctccacctaacacccatttagatcggatacgcatgaggct

SEQ ID NO: 4816 - DNA, 146 bp, Artificial Sequence
  Bisulfite Padlock Probe
  misc_feature 92, 93, 94, 95, 96, 97: n = A,T,C or G
gactggaagagcactgttcctaaaaactactccaaacgacgccgttggaggctcatcgttcctattcaggcagatgttatcgaggtccgacnnnnnnaactcactcctccacctaacgcccatttagatcggatacgcatgaggct

SEQ ID NO: 4817 - DNA, 146 bp, Artificial Sequence
  Bisulfite Padlock Probe
  misc_feature 92, 93, 94, 95, 96, 97: n = A,T,C or G
gactggaagagcactgttcctaaaaatttcaaaaaaccaacccgttggaggctcatcgttcctattcaggcagatgttatcgaggtccgacnnnnnnaaaaaccgaaaataaaaaccgtataccaagatcggatacgcatgaggct

SEQ ID NO: 4818 - DNA, 146 bp, Artificial Sequence
  Bisulfite Padlock Probe
  misc_feature 92, 93, 94, 95, 96, 97: n = A,T,C or G
gactggaagagcactgttcctaaaaatttcgaaaaaccaacccgttggaggctcatcgttcctattcaggcagatgttatcgaggtccgacnnnnnnaaaaaccgaaaataaaaaccgtataccgagatcggatacgcatgaggct

SEQ ID NO: 4819 - DNA, 146 bp, Artificial Sequence
  Bisulfite Padlock Probe
  misc_feature 95, 96, 97, 98, 99, 100: n = A,T,C or G
gactggaagagcactgttcctaaacaacatctctaaatacccaaacgttggaggctcatcgttcctattcaggcagatgttatcgaggtccgacnnnnnnatcgacaacaaaacccaaatcaacccgatcggatacgcatgaggct

SEQ ID NO: 4820 - DNA, 146 bp, Artificial Sequence
  Bisulfite Padlock Probe
  misc_feature 96, 97, 98, 99, 100, 101: n = A,T,C or G
gactggaagagcactgttcctaaacaaccacaacaacaactacaaccgttggaggctcatcgttcctattcaggcagatgttatcgaggtccgacnnnnnnaaaaataaataacgaactaaacaacgatcggatacgcatgaggct

SEQ ID NO: 4821 - DNA, 146 bp, Artificial Sequence
  Bisulfite Padlock Probe
  misc_feature 96, 97, 98, 99, 100, 101: n = A,T,C or G
gactggaagagcactgttcctaaacaaccgcaacaacaactacaaccgttggaggctcatcgttcctattcaggcagatgttatcgaggtccgacnnnnnnaaaaataaataacgaactaaacgacgatcggatacgcatgaggct

SEQ ID NO: 4822 - DNA, 146 bp, Artificial Sequence
  Bisulfite Padlock Probe
  misc_feature 94, 95, 96, 97, 98, 99: n = A,T,C or G
gactggaagagcactgttcctaaacaactcgctataaatacacccgttggaggctcatcgttcctattcaggcagatgttatcgaggtccgacnnnnnnacgaccaaatcctccaacaactaaaaagatcggatacgcatgaggct

SEQ ID NO: 4823 - DNA, 146 bp, Artificial Sequence
  Bisulfite Padlock Probe
  misc_feature 94, 95, 96, 97, 98, 99: n = A,T,C or G
gactggaagagcactgttcctaaacaactcgctataaatacgcccgttggaggctcatcgttcctattcaggcagatgttatcgaggtccgacnnnnnnacgaccgaatcctccaacaactaaaaagatcggatacgcatgaggct

SEQ ID NO: 4824 - DNA, 146 bp, Artificial Sequence
  Bisulfite Padlock Probe
  misc_feature 95, 96, 97, 98, 99, 100: n = A,T,C or G
gactggaagagcactgttcctaaaccaaacctcaaatatataaaacgttggaggctcatcgttcctattcaggcagatgttatcgaggtccgacnnnnnncaacaaaaaactacccctacaaccccgatcggatacgcatgaggct

SEQ ID NO: 4825 - DNA, 146 bp, Artificial Sequence
  Bisulfite Padlock Probe
  misc_feature 95, 96, 97, 98, 99, 100: n = A,T,C or G
gactggaagagcactgttcctaaaccaaacctcgaatatataaaacgttggaggctcatcgttcctattcaggcagatgttatcgaggtccgacnnnnnncaacgaaaaactacccctacaaccccgatcggatacgcatgaggct

SEQ ID NO: 4826 - DNA, 146 bp, Artificial Sequence
  Bisulfite Padlock Probe
  misc_feature 92, 93, 94, 95, 96, 97: n = A,T,C or G
gactggaagagcactgttcctaaacccaaacccaattcaacaagttggaggctcatcgttcctattcaggcagatgttatcgaggtccgacnnnnnnttaaaaccacttcctccataaaaccctccgatcggatacgcatgaggct

SEQ ID NO: 4827 - DNA, 146 bp, Artificial Sequence
  Bisulfite Padlock Probe
  misc_feature 92, 93, 94, 95, 96, 97: n = A,T,C or G
gactggaagagcactgttcctaaacccaaacccgattcaacaagttggaggctcatcgttcctattcaggcagatgttatcgaggtccgacnnnnnnttaaaaccacttcctccgtaaaaccctccgatcggatacgcatgaggct

SEQ ID NO: 4828 - DNA, 146 bp, Artificial Sequence
  Bisulfite Padlock Probe
  misc_feature 92, 93, 94, 95, 96, 97: n = A,T,C or G
gactggaagagcactgttcctaaaccgaaacgtcctccaaaacgttggaggctcatcgttcctattcaggcagatgttatcgaggtccgacnnnnnnaactacaaaaccacgaacacctacaaaaagatcggatacgcatgaggct

SEQ ID NO: 4829 - DNA, 146 bp, Artificial Sequence
  Bisulfite Padlock Probe
  misc_feature 92, 93, 94, 95, 96, 97: n = A,T,C or G
gactggaagagcactgttcctaaaccgaaacgtcctccgaaacgttggaggctcatcgttcctattcaggcagatgttatcgaggtccgacnnnnnnaactacaaaaccacgaacacctacgaaaagatcggatacgcatgaggct

SEQ ID NO: 4830 - DNA, 146 bp, Artificial Sequence
  Bisulfite Padlock Probe
  misc_feature 95, 96, 97, 98, 99, 100: n = A,T,C or G
gactggaagagcactgttcctaaacctacttccctaacccaaaaacgttggaggctcatcgttcctattcaggcagatgttatcgaggtccgacnnnnnncaccctaaaacctcacaccctccaccgatcggatacgcatgaggct

SEQ ID NO: 4831 - DNA, 146 bp, Artificial Sequence
  Bisulfite Padlock Probe
  misc_feature 95, 96, 97, 98, 99, 100: n = A,T,C or G
gactggaagagcactgttcctaaacctacttccctaacccgaaaacgttggaggctcatcgttcctattcaggcagatgttatcgaggtccgacnnnnnncaccctaaaacctcacaccctccaccgatcggatacgcatgaggct

SEQ ID NO: 4832 - DNA, 146 bp, Artificial Sequence
  Bisulfite Padlock Probe
  misc_feature 95, 96, 97, 98, 99, 100: n = A,T,C or G
gactggaagagcactgttcctaaacgacatctctaaatacccaaacgttggaggctcatcgttcctattcaggcagatgttatcgaggtccgacnnnnnnatcgacaacgaaacccaaatcaacccgatcggatacgcatgaggct

SEQ ID NO: 4833 - DNA, 146 bp, Artificial Sequence
  Bisulfite Padlock Probe
  misc_feature 93, 94, 95, 96, 97, 98: n = A,T,C or G
gactggaagagcactgttcctaaatcccctctaaaaattttaccgttggaggctcatcgttcctattcaggcagatgttatcgaggtccgacnnnnnncttaaaactactatactctccacaaaccgatcggatacgcatgaggct

SEQ ID NO: 4834 - DNA, 146 bp, Artificial Sequence
  Bisulfite Padlock Probe
  misc_feature 96, 97, 98, 99, 100, 101: n = A,T,C or G
gactggaagagcactgttcctaaatttactataaataacatataaacgttggaggctcatcgttcctattcaggcagatgttatcgaggtccgacnnnnnncttacgaaaatctcactacaaaatagatcggatacgcatgaggct

SEQ ID NO: 4835 - DNA, 146 bp, Artificial Sequence
  Bisulfite Padlock Probe
  misc_feature 96, 97, 98, 99, 100, 101: n = A,T,C or G
gactggaagagcactgttcctaaatttactataaataacgtataaacgttggaggctcatcgttcctattcaggcagatgttatcgaggtccgacnnnnnncttacgaaaatctcactacgaaatagatcggatacgcatgaggct

SEQ ID NO: 4836 - DNA, 146 bp, Artificial Sequence
  Bisulfite Padlock Probe
  misc_feature 92, 93, 94, 95, 96, 97: n = A,T,C or G
gactggaagagcactgttcctaacccgaatcactcaaatacaagttggaggctcatcgttcctattcaggcagatgttatcgaggtccgacnnnnnnacacccgaacacccaattcaatctaactagatcggatacgcatgaggct

SEQ ID NO: 4837 - DNA, 146 bp, Artificial Sequence
  Bisulfite Padlock Probe
  misc_feature 92, 93, 94, 95, 96, 97: n = A,T,C or G
gactggaagagcactgttcctaacccgaatcgctcaaatacaagttggaggctcatcgttcctattcaggcagatgttatcgaggtccgacnnnnnnacacccgaacacccgattcaatctaactagatcggatacgcatgaggct

SEQ ID NO: 4838 - DNA, 146 bp, Artificial Sequence
  Bisulfite Padlock Probe
  misc_feature 93, 94, 95, 96, 97, 98: n = A,T,C or G
gactggaagagcactgttcctaaccgaaatctcctccccactacgttggaggctcatcgttcctattcaggcagatgttatcgaggtccgacnnnnnncgactccgaaacaaactcacttaactccgatcggatacgcatgaggct

SEQ ID NO: 4839 - DNA, 146 bp, Artificial Sequence
  Bisulfite Padlock Probe
  misc_feature 93, 94, 95, 96, 97, 98: n = A,T,C or G
gactggaagagcactgttcctaaccgaaatctcctccccgctacgttggaggctcatcgttcctattcaggcagatgttatcgaggtccgacnnnnnncgactccgaaacgaactcacttaactccgatcggatacgcatgaggct

SEQ ID NO: 4840 - DNA, 146 bp, Artificial Sequence
  Bisulfite Padlock Probe
  misc_feature 95, 96, 97, 98, 99, 100: n = A,T,C or G
gactggaagagcactgttcctaataccgcaaaccgcactcaaaaacgttggaggctcatcgttcctattcaggcagatgttatcgaggtccgacnnnnnnaactacccaaaaccaacccattcaacgatcggatacgcatgaggct

SEQ ID NO: 4841 - DNA, 146 bp, Artificial Sequence
  Bisulfite Padlock Probe
  misc_feature 95, 96, 97, 98, 99, 100: n = A,T,C or G
gactggaagagcactgttcctaataccgcaaaccgcgctcaaaaacgttggaggctcatcgttcctattcaggcagatgttatcgaggtccgacnnnnnnaactacccaaaaccaacccattcaacgatcggatacgcatgaggct

SEQ ID NO: 4842 - DNA, 146 bp, Artificial Sequence
  Bisulfite Padlock Probe
  misc_feature 92, 93, 94, 95, 96, 97: n = A,T,C or G
gactggaagagcactgttcctaatacgaaaaacaataatcaacgttggaggctcatcgttcctattcaggcagatgttatcgaggtccgacnnnnnncctaatcctccaaaccttcccaacaaacagatcggatacgcatgaggct

SEQ ID NO: 4843 - DNA, 146 bp, Artificial Sequence
  Bisulfite Padlock Probe
  misc_feature 92, 93, 94, 95, 96, 97: n = A,T,C or G
gactggaagagcactgttcctaatacgaaaaacgataatcaacgttggaggctcatcgttcctattcaggcagatgttatcgaggtccgacnnnnnncctaatcctccaaaccttcccaacaaacagatcggatacgcatgaggct

SEQ ID NO: 4844 - DNA, 146 bp, Artificial Sequence
  Bisulfite Padlock Probe
  misc_feature 94, 95, 96, 97, 98, 99: n = A,T,C or G
gactggaagagcactgttcctaatacgccatctaaactacctatagttggaggctcatcgttcctattcaggcagatgttatcgaggtccgacnnnnnncactacctacccctttaaccaaaactagatcggatacgcatgaggct

SEQ ID NO: 4845 - DNA, 146 bp, Artificial Sequence
  Bisulfite Padlock Probe
  misc_feature 94, 95, 96, 97, 98, 99: n = A,T,C or G
gactggaagagcactgttcctaatacgccgtctaaactacctatagttggaggctcatcgttcctattcaggcagatgttatcgaggtccgacnnnnnncactacctacccctttaaccgaaactagatcggatacgcatgaggct

SEQ ID NO: 4846 - DNA, 146 bp, Artificial Sequence
  Bisulfite Padlock Probe
  misc_feature 93, 94, 95, 96, 97, 98: n = A,T,C or G
gactggaagagcactgttcctaatactcccatctaccactacccgttggaggctcatcgttcctattcaggcagatgttatcgaggtccgacnnnnnntccacaatactaaaccaaaaacctcttcgatcggatacgcatgaggct

SEQ ID NO: 4847 - DNA, 146 bp, Artificial Sequence
  Bisulfite Padlock Probe
  misc_feature 93, 94, 95, 96, 97, 98: n = A,T,C or G
gactggaagagcactgttcctaatactcccatctaccgctacccgttggaggctcatcgttcctattcaggcagatgttatcgaggtccgacnnnnnntccacaatactaaaccgaaaacctcttcgatcggatacgcatgaggct

SEQ ID NO: 4848 - DNA, 146 bp, Artificial Sequence
  Bisulfite Padlock Probe
  misc_feature 96, 97, 98, 99, 100, 101: n = A,T,C or G
gactggaagagcactgttcctaatccccgctacttcaaaactcctacgttggaggctcatcgttcctattcaggcagatgttatcgaggtccgacnnnnnnaactatacccccacacctataacccgatcggatacgcatgaggct

SEQ ID NO: 4849 - DNA, 146 bp, Artificial Sequence
  Bisulfite Padlock Probe
  misc_feature 96, 97, 98, 99, 100, 101: n = A,T,C or G
gactggaagagcactgttcctaatccccgctacttcgaaactcctacgttggaggctcatcgttcctattcaggcagatgttatcgaggtccgacnnnnnnaactatacccccacacctataacccgatcggatacgcatgaggct

SEQ ID NO: 4850 - DNA, 146 bp, Artificial Sequence
  Bisulfite Padlock Probe
  misc_feature 95, 96, 97, 98, 99, 100: n = A,T,C or G
gactggaagagcactgttcctacaaaaattcacaaacccaaaaaccgttggaggctcatcgttcctattcaggcagatgttatcgaggtccgacnnnnnnaaaaactttctttaaatccacatttcgatcggatacgcatgaggct

SEQ ID NO: 4851 - DNA, 146 bp, Artificial Sequence
  Bisulfite Padlock Probe
  misc_feature 95, 96, 97, 98, 99, 100: n = A,T,C or G
gactggaagagcactgttcctacaaaaattcacaaacccgaaaaccgttggaggctcatcgttcctattcaggcagatgttatcgaggtccgacnnnnnnaaaaactttctttaaatccacgtttcgatcggatacgcatgaggct

SEQ ID NO: 4852 - DNA, 146 bp, Artificial Sequence
  Bisulfite Padlock Probe
  misc_feature 93, 94, 95, 96, 97, 98: n = A,T,C or G
gactggaagagcactgttcctacaactaacaactaatacacaacgttggaggctcatcgttcctattcaggcagatgttatcgaggtccgacnnnnnnccaaacgaccccgacaaaaaacaaaatcgatcggatacgcatgaggct

SEQ ID NO: 4853 - DNA, 146 bp, Artificial Sequence
  Bisulfite Padlock Probe
  misc_feature 93, 94, 95, 96, 97, 98: n = A,T,C or G
gactggaagagcactgttcctacaactaacgactaatacacaacgttggaggctcatcgttcctattcaggcagatgttatcgaggtccgacnnnnnnccaaacgaccccgacgaaaaacaaaatcgatcggatacgcatgaggct

SEQ ID NO: 4854 - DNA, 146 bp, Artificial Sequence
  Bisulfite Padlock Probe
  misc_feature 95, 96, 97, 98, 99, 100: n = A,T,C or G
gactggaagagcactgttcctacacaaactcctaacctacaaaaacgttggaggctcatcgttcctattcaggcagatgttatcgaggtccgacnnnnnnaacccgaactaaatcaaaaatcctctgatcggatacgcatgaggct

SEQ ID NO: 4855 - DNA, 146 bp, Artificial Sequence
  Bisulfite Padlock Probe
  misc_feature 93, 94, 95, 96, 97, 98: n = A,T,C or G
gactggaagagcactgttcctacacccgaaactaaaacaacaacgttggaggctcatcgttcctattcaggcagatgttatcgaggtccgacnnnnnnatcccccgcccaaaacatctaataaaccgatcggatacgcatgaggct

SEQ ID NO: 4856 - DNA, 146 bp, Artificial Sequence
  Bisulfite Padlock Probe
  misc_feature 93, 94, 95, 96, 97, 98: n = A,T,C or G
gactggaagagcactgttcctacacccgaaactaaaacaacgacgttggaggctcatcgttcctattcaggcagatgttatcgaggtccgacnnnnnnatcccccgcccgaaacatctaataaaccgatcggatacgcatgaggct

SEQ ID NO: 4857 - DNA, 146 bp, Artificial Sequence
  Bisulfite Padlock Probe
  misc_feature 92, 93, 94, 95, 96, 97: n = A,T,C or G
gactggaagagcactgttcctaccaattctccccgacacatacgttggaggctcatcgttcctattcaggcagatgttatcgaggtccgacnnnnnnccgcgaacctcgaacaacattaacaactagatcggatacgcatgaggct

SEQ ID NO: 4858 - DNA, 146 bp, Artificial Sequence
  Bisulfite Padlock Probe
  misc_feature 92, 93, 94, 95, 96, 97: n = A,T,C or G
gactggaagagcactgttcctaccaattctccccgacacgtacgttggaggctcatcgttcctattcaggcagatgttatcgaggtccgacnnnnnnccgcgaacctcgaacgacattaacaactagatcggatacgcatgaggct

SEQ ID NO: 4859 - DNA, 146 bp, Artificial Sequence
  Bisulfite Padlock Probe
  misc_feature 96, 97, 98, 99, 100, 101: n = A,T,C or G
gactggaagagcactgttcctacccaaaatctataaaactaattaacgttggaggctcatcgttcctattcaggcagatgttatcgaggtccgacnnnnnnccaactcccgaacaccatacaaaccgatcggatacgcatgaggct

SEQ ID NO: 4860 - DNA, 146 bp, Artificial Sequence
  Bisulfite Padlock Probe
  misc_feature 93, 94, 95, 96, 97, 98: n = A,T,C or G
gactggaagagcactgttcctacccacccctccaactctactacgttggaggctcatcgttcctattcaggcagatgttatcgaggtccgacnnnnnnactctaactccctcaaaataaccaaaaagatcggatacgcatgaggct

SEQ ID NO: 4861 - DNA, 146 bp, Artificial Sequence
  Bisulfite Padlock Probe
  misc_feature 93, 94, 95, 96, 97, 98: n = A,T,C or G
gactggaagagcactgttcctacccacccctccgactctactacgttggaggctcatcgttcctattcaggcagatgttatcgaggtccgacnnnnnnactctaactccctcaaaataaccaaaaagatcggatacgcatgaggct

SEQ ID NO: 4862 - DNA, 146 bp, Artificial Sequence
  Bisulfite Padlock Probe
  misc_feature 92, 93, 94, 95, 96, 97: n = A,T,C or G
gactggaagagcactgttcctaccccgccaaacgaaacaaaacgttggaggctcatcgttcctattcaggcagatgttatcgaggtccgacnnnnnntcctcctcccgacaaatcgaaacaaaaacgatcggatacgcatgaggct

SEQ ID NO: 4863 - DNA, 146 bp, Artificial Sequence
  Bisulfite Padlock Probe
  misc_feature 92, 93, 94, 95, 96, 97: n = A,T,C or G
gactggaagagcactgttcctaccccgccaaacgaaacgaaacgttggaggctcatcgttcctattcaggcagatgttatcgaggtccgacnnnnnntcctcctcccgacaaatcgaaacgaaaacgatcggatacgcatgaggct

SEQ ID NO: 4864 - DNA, 146 bp, Artificial Sequence
  Bisulfite Padlock Probe
  misc_feature 96, 97, 98, 99, 100, 101: n = A,T,C or G
gactggaagagcactgttcctacccgaaatctataaaactaattaacgttggaggctcatcgttcctattcaggcagatgttatcgaggtccgacnnnnnnccaactcccgaacaccatacgaaccgatcggatacgcatgaggct

SEQ ID NO: 4865 - DNA, 146 bp, Artificial Sequence
  Bisulfite Padlock Probe
  misc_feature 94, 95, 96, 97, 98, 99: n = A,T,C or G
gactggaagagcactgttcctaccgcaccttaacgaccacaaatagttggaggctcatcgttcctattcaggcagatgttatcgaggtccgacnnnnnnatcttatcccgatctcgtcctctccacgatcggatacgcatgaggct

SEQ ID NO: 4866 - DNA, 146 bp, Artificial Sequence
  Bisulfite Padlock Probe
  misc_feature 94, 95, 96, 97, 98, 99: n = A,T,C or G
gactggaagagcactgttcctaccgcaccttaacgaccgcaaatagttggaggctcatcgttcctattcaggcagatgttatcgaggtccgacnnnnnnatcttatcccgatctcgtcctctccgcgatcggatacgcatgaggct

SEQ ID NO: 4867 - DNA, 146 bp, Artificial Sequence
  Bisulfite Padlock Probe
  misc_feature 92, 93, 94, 95, 96, 97: n = A,T,C or G
gactggaagagcactgttcctacctcctcatatctccaaacccgttggaggctcatcgttcctattcaggcagatgttatcgaggtccgacnnnnnnttcttctcctacctcctcaacacaaattcgatcggatacgcatgaggct

SEQ ID NO: 4868 - DNA, 146 bp, Artificial Sequence
  Bisulfite Padlock Probe
  misc_feature 92, 93, 94, 95, 96, 97: n = A,T,C or G
gactggaagagcactgttcctacctcctcatatctccaaacccgttggaggctcatcgttcctattcaggcagatgttatcgaggtccgacnnnnnnttcttctcctacctcctcaacgcaaattcgatcggatacgcatgaggct

SEQ ID NO: 4869 - DNA, 146 bp, Artificial Sequence
  Bisulfite Padlock Probe
  misc_feature 92, 93, 94, 95, 96, 97: n = A,T,C or G
gactggaagagcactgttcctaccttaccataactcttaaactgttggaggctcatcgttcctattcaggcagatgttatcgaggtccgacnnnnnncatatttacaaataaatctaaacaaaacagatcggatacgcatgaggct

SEQ ID NO: 4870 - DNA, 146 bp, Artificial Sequence
  Bisulfite Padlock Probe
  misc_feature 92, 93, 94, 95, 96, 97: n = A,T,C or G
gactggaagagcactgttcctaccttaccataactcttaaactgttggaggctcatcgttcctattcaggcagatgttatcgaggtccgacnnnnnncatatttacgaataaatctaaacaaaacagatcggatacgcatgaggct

SEQ ID NO: 4871 - DNA, 146 bp, Artificial Sequence
  Bisulfite Padlock Probe
  misc_feature 92, 93, 94, 95, 96, 97: n = A,T,C or G
gactggaagagcactgttcctacgaacgcaaaaaactaatattgttggaggctcatcgttcctattcaggcagatgttatcgaggtccgacnnnnnnaaccactatacccaaaacccactaaaacagatcggatacgcatgaggct

SEQ ID NO: 4872 - DNA, 146 bp, Artificial Sequence
  Bisulfite Padlock Probe
  misc_feature 92, 93, 94, 95, 96, 97: n = A,T,C or G
gactggaagagcactgttcctacgaacgcgaaaaactaatattgttggaggctcatcgttcctattcaggcagatgttatcgaggtccgacnnnnnnaaccgctatacccaaaacccactaaaacagatcggatacgcatgaggct

SEQ ID NO: 4873 - DNA, 146 bp, Artificial Sequence
  Bisulfite Padlock Probe
  misc_feature 95, 96, 97, 98, 99, 100: n = A,T,C or G
gactggaagagcactgttcctacgcaaactcctaacctacaaaaacgttggaggctcatcgttcctattcaggcagatgttatcgaggtccgacnnnnnnaacccgaactaaatcgaaaatcctctgatcggatacgcatgaggct

SEQ ID NO: 4874 - DNA, 146 bp, Artificial Sequence
  Bisulfite Padlock Probe
  misc_feature 92, 93, 94, 95, 96, 97: n = A,T,C or G
gactggaagagcactgttcctacgcgcccacaatacaaaaaccgttggaggctcatcgttcctattcaggcagatgttatcgaggtccgacnnnnnnattttaacaccttaaccttccctaaaaccgatcggatacgcatgaggct

SEQ ID NO: 4875 - DNA, 146 bp, Artificial Sequence
  Bisulfite Padlock Probe
  misc_feature 92, 93, 94, 95, 96, 97: n = A,T,C or G
gactggaagagcactgttcctacgcgcccgcaatacaaaaaccgttggaggctcatcgttcctattcaggcagatgttatcgaggtccgacnnnnnnattttaacaccttaaccttccctaaaaccgatcggatacgcatgaggct

SEQ ID NO: 4876 - DNA, 146 bp, Artificial Sequence
  Bisulfite Padlock Probe
  misc_feature 92, 93, 94, 95, 96, 97: n = A,T,C or G
gactggaagagcactgttcctacgctatcacccctactaaacagttggaggctcatcgttcctattcaggcagatgttatcgaggtccgacnnnnnncccaaaataactctccaaatccactaaacgatcggatacgcatgaggct

SEQ ID NO: 4877 - DNA, 146 bp, Artificial Sequence
  Bisulfite Padlock Probe
  misc_feature 92, 93, 94, 95, 96, 97: n = A,T,C or G
gactggaagagcactgttcctacgctatcgcccctactaaacagttggaggctcatcgttcctattcaggcagatgttatcgaggtccgacnnnnnncccaaaataactctccgaatccactaaacgatcggatacgcatgaggct

SEQ ID NO: 4878 - DNA, 146 bp, Artificial Sequence
  Bisulfite Padlock Probe
  misc_feature 96, 97, 98, 99, 100, 101: n = A,T,C or G
gactggaagagcactgttcctactaaaactaactacaaacccaaaacgttggaggctcatcgttcctattcaggcagatgttatcgaggtccgacnnnnnnacaaatcctccacgacaccaaaaccgatcggatacgcatgaggct

SEQ ID NO: 4879 - DNA, 146 bp, Artificial Sequence
  Bisulfite Padlock Probe
  misc_feature 96, 97, 98, 99, 100, 101: n = A,T,C or G
gactggaagagcactgttcctactaaaactaactacaaacccgaaacgttggaggctcatcgttcctattcaggcagatgttatcgaggtccgacnnnnnnacaaatcctccacgacaccgaaaccgatcggatacgcatgaggct

SEQ ID NO: 4880 - DNA, 146 bp, Artificial Sequence
  Bisulfite Padlock Probe
  misc_feature 95, 96, 97, 98, 99, 100: n = A,T,C or G
gactggaagagcactgttcctactcgacgtcctcgtcttcaaaatcgttggaggctcatcgttcctattcaggcagatgttatcgaggtccgacnnnnnntaaccaccgtacgcccataaataccagatcggatacgcatgaggct

SEQ ID NO: 4881 - DNA, 146 bp, Artificial Sequence
  Bisulfite Padlock Probe
  misc_feature 95, 96, 97, 98, 99, 100: n = A,T,C or G
gactggaagagcactgttcctactcgacgtcctcgtcttcgaaatcgttggaggctcatcgttcctattcaggcagatgttatcgaggtccgacnnnnnntaaccaccgtacgcccgtaaataccagatcggatacgcatgaggct

SEQ ID NO: 4882 - DNA, 146 bp, Artificial Sequence
  Bisulfite Padlock Probe
  misc_feature 95, 96, 97, 98, 99, 100: n = A,T,C or G
gactggaagagcactgttcctataactcaaaatacgaccaaaaaacgttggaggctcatcgttcctattcaggcagatgttatcgaggtccgacnnnnnnaaacgaacccgaacgcaacttcttctgatcggatacgcatgaggct

SEQ ID NO: 4883 - DNA, 146 bp, Artificial Sequence
  Bisulfite Padlock Probe
  misc_feature 95, 96, 97, 98, 99, 100: n = A,T,C or G
gactggaagagcactgttcctataactcaaaatacgaccgaaaaacgttggaggctcatcgttcctattcaggcagatgttatcgaggtccgacnnnnnnaaacgaacccgaacgcgacttcttctgatcggatacgcatgaggct

SEQ ID NO: 4884 - DNA, 146 bp, Artificial Sequence
  Bisulfite Padlock Probe
  misc_feature 96, 97, 98, 99, 100, 101: n = A,T,C or G
gactggaagagcactgttcctatatccgcacgcatatattaaaacaagttggaggctcatcgttcctattcaggcagatgttatcgaggtccgacnnnnnngtcaactcgctacccactaccaaccgatcggatacgcatgaggct

SEQ ID NO: 4885 - DNA, 146 bp, Artificial Sequence
  Bisulfite Padlock Probe
  misc_feature 96, 97, 98, 99, 100, 101: n = A,T,C or G
gactggaagagcactgttcctatatccgcacgcgtatattaaaacaagttggaggctcatcgttcctattcaggcagatgttatcgaggtccgacnnnnnngtcaactcgctacccactaccgaccgatcggatacgcatgaggct

SEQ ID NO: 4886 - DNA, 146 bp, Artificial Sequence
  Bisulfite Padlock Probe
  misc_feature 95, 96, 97, 98, 99, 100: n = A,T,C or G
gactggaagagcactgttcctattaaaatttcttattattattttcgttggaggctcatcgttcctattcaggcagatgttatcgaggtccgacnnnnnntcctaataccctaatcgaaacaattcgatcggatacgcatgaggct

SEQ ID NO: 4887 - DNA, 146 bp, Artificial Sequence
  Bisulfite Padlock Probe
  misc_feature 95, 96, 97, 98, 99, 100: n = A,T,C or G
gactggaagagcactgttcctattaaaatttcttattattattttcgttggaggctcatcgttcctattcaggcagatgttatcgaggtccgacnnnnnntcctaataccctaatcgaaacgattcgatcggatacgcatgaggct

SEQ ID NO: 4888 - DNA, 146 bp, Artificial Sequence
  Bisulfite Padlock Probe
  misc_feature 96, 97, 98, 99, 100, 101: n = A,T,C or G
gactggaagagcactgttcctcaacccaaaactacaaattctacaacgttggaggctcatcgttcctattcaggcagatgttatcgaggtccgacnnnnnnacaacctcaaaacctaccactcctcgatcggatacgcatgaggct

SEQ ID NO: 4889 - DNA, 146 bp, Artificial Sequence
  Bisulfite Padlock Probe
  misc_feature 95, 96, 97, 98, 99, 100: n = A,T,C or G
gactggaagagcactgttcctcaccctaaccgaacccataaactacgttggaggctcatcgttcctattcaggcagatgttatcgaggtccgacnnnnnnaaataaaactaacgaaaaacgcacccgatcggatacgcatgaggct

SEQ ID NO: 4890 - DNA, 146 bp, Artificial Sequence
  Bisulfite Padlock Probe
  misc_feature 95, 96, 97, 98, 99, 100: n = A,T,C or G
gactggaagagcactgttcctcaccctaaccgaacccgtaaactacgttggaggctcatcgttcctattcaggcagatgttatcgaggtccgacnnnnnnaaataaaactaacgaaaaacgcgcccgatcggatacgcatgaggct

SEQ ID NO: 4891 - DNA, 146 bp, Artificial Sequence
  Bisulfite Padlock Probe
  misc_feature 94, 95, 96, 97, 98, 99: n = A,T,C or G
gactggaagagcactgttcctcacctacaaaatattccatttcccgttggaggctcatcgttcctattcaggcagatgttatcgaggtccgacnnnnnncttataaatttaaaaactactccaaacgatcggatacgcatgaggct

SEQ ID NO: 4892 - DNA, 146 bp, Artificial Sequence
  Bisulfite Padlock Probe
  misc_feature 94, 95, 96, 97, 98, 99: n = A,T,C or G
gactggaagagcactgttcctcacctacgaaatattccatttcccgttggaggctcatcgttcctattcaggcagatgttatcgaggtccgacnnnnnncttataaatttaaaaactactccaaacgatcggatacgcatgaggct

SEQ ID NO: 4893 - DNA, 146 bp, Artificial Sequence
  Bisulfite Padlock Probe
  misc_feature 93, 94, 95, 96, 97, 98: n = A,T,C or G
gactggaagagcactgttcctcactcaataaactatccctactcgttggaggctcatcgttcctattcaggcagatgttatcgaggtccgacnnnnnncccctaattaaataaaactccaatccccgatcggatacgcatgaggct

SEQ ID NO: 4894 - DNA, 146 bp, Artificial Sequence
  Bisulfite Padlock Probe
  misc_feature 96, 97, 98, 99, 100, 101: n = A,T,C or G
gactggaagagcactgttcctccaaaataatctcataaatattctacgttggaggctcatcgttcctattcaggcagatgttatcgaggtccgacnnnnnnccgacgaaataacaaccaaactatcgatcggatacgcatgaggct

SEQ ID NO: 4895 - DNA, 146 bp, Artificial Sequence
  Bisulfite Padlock Probe
  misc_feature 96, 97, 98, 99, 100, 101: n = A,T,C or G
gactggaagagcactgttcctccaaaataatctcgtaaatattctacgttggaggctcatcgttcctattcaggcagatgttatcgaggtccgacnnnnnnccgacgaaataacgaccaaactatcgatcggatacgcatgaggct

SEQ ID NO: 4896 - DNA, 146 bp, Artificial Sequence
  Bisulfite Padlock Probe
  misc_feature 95, 96, 97, 98, 99, 100: n = A,T,C or G
gactggaagagcactgttcctccaacccaatatcttactaaaaactgttggaggctcatcgttcctattcaggcagatgttatcgaggtccgacnnnnnntaaatacgacccctcaacaccccttcgatcggatacgcatgaggct

SEQ ID NO: 4897 - DNA, 146 bp, Artificial Sequence
  Bisulfite Padlock Probe
  misc_feature 95, 96, 97, 98, 99, 100: n = A,T,C or G
gactggaagagcactgttcctccaacccaatatcttactaaaaactgttggaggctcatcgttcctattcaggcagatgttatcgaggtccgacnnnnnntaaatacgacccctcaacgccccttcgatcggatacgcatgaggct

SEQ ID NO: 4898 - DNA, 146 bp, Artificial Sequence
  Bisulfite Padlock Probe
  misc_feature 93, 94, 95, 96, 97, 98: n = A,T,C or G
gactggaagagcactgttcctccaactcctaaaactactaactagttggaggctcatcgttcctattcaggcagatgttatcgaggtccgacnnnnnnctcccaaacgacactaccttccacattcgatcggatacgcatgaggct

SEQ ID NO: 4899 - DNA, 146 bp, Artificial Sequence
  Bisulfite Padlock Probe
  misc_feature 93, 94, 95, 96, 97, 98: n = A,T,C or G
gactggaagagcactgttcctccaactcctaaaactactaactagttggaggctcatcgttcctattcaggcagatgttatcgaggtccgacnnnnnnctcccaaacgacgctaccttccacattcgatcggatacgcatgaggct

SEQ ID NO: 4900 - DNA, 146 bp, Artificial Sequence
  Bisulfite Padlock Probe
  misc_feature 92, 93, 94, 95, 96, 97: n = A,T,C or G
gactggaagagcactgttcctccacctacaacttcacctatccgttggaggctcatcgttcctattcaggcagatgttatcgaggtccgacnnnnnnataacaacctaacgcccctacctcaaaaagatcggatacgcatgaggct

SEQ ID NO: 4901 - DNA, 146 bp, Artificial Sequence
  Bisulfite Padlock Probe
  misc_feature 92, 93, 94, 95, 96, 97: n = A,T,C or G
gactggaagagcactgttcctccacctacaacttcacctatccgttggaggctcatcgttcctattcaggcagatgttatcgaggtccgacnnnnnnataacaacctaacgcccctacctcgaaaagatcggatacgcatgaggct

SEQ ID NO: 4902 - DNA, 146 bp, Artificial Sequence
  Bisulfite Padlock Probe
  misc_feature 92, 93, 94, 95, 96, 97: n = A,T,C or G
gactggaagagcactgttcctcccaacctaaccataaactaacgttggaggctcatcgttcctattcaggcagatgttatcgaggtccgacnnnnnnccctccttaaaccaccaaaaaccactcttgatcggatacgcatgaggct

SEQ ID NO: 4903 - DNA, 146 bp, Artificial Sequence
  Bisulfite Padlock Probe
  misc_feature 93, 94, 95, 96, 97, 98: n = A,T,C or G
gactggaagagcactgttcctcccacaaaaatatataacccttagttggaggctcatcgttcctattcaggcagatgttatcgaggtccgacnnnnnnacataaaacctaaaaatcataataaattgatcggatacgcatgaggct

SEQ ID NO: 4904 - DNA, 146 bp, Artificial Sequence
  Bisulfite Padlock Probe
  misc_feature 93, 94, 95, 96, 97, 98: n = A,T,C or G
gactggaagagcactgttcctcccccgacaaaaatcccttcttcgttggaggctcatcgttcctattcaggcagatgttatcgaggtccgacnnnnnnacacgtaactaaatacaaacactaacccgatcggatacgcatgaggct

SEQ ID NO: 4905 - DNA, 146 bp, Artificial Sequence
  Bisulfite Padlock Probe
  misc_feature 93, 94, 95, 96, 97, 98: n = A,T,C or G
gactggaagagcactgttcctcccccgacgaaaatcccttcttcgttggaggctcatcgttcctattcaggcagatgttatcgaggtccgacnnnnnnacacgtaactaaatacaaacgctaacccgatcggatacgcatgaggct

SEQ ID NO: 4906 - DNA, 146 bp, Artificial Sequence
  Bisulfite Padlock Probe
  misc_feature 92, 93, 94, 95, 96, 97: n = A,T,C or G
gactggaagagcactgttcctcccctcaccccaaaaacaaaaagttggaggctcatcgttcctattcaggcagatgttatcgaggtccgacnnnnnnaatcaaaaacctcaacctaaaaaccattcgatcggatacgcatgaggct

SEQ ID NO: 4907 - DNA, 146 bp, Artificial Sequence
  Bisulfite Padlock Probe
  misc_feature 92, 93, 94, 95, 96, 97: n = A,T,C or G
gactggaagagcactgttcctcccgacctaaccataaactaacgttggaggctcatcgttcctattcaggcagatgttatcgaggtccgacnnnnnnccctccttaaaccaccgaaaaccactcttgatcggatacgcatgaggct

SEQ ID NO: 4908 - DNA, 146 bp, Artificial Sequence
  Bisulfite Padlock Probe
  misc_feature 93, 94, 95, 96, 97, 98: n = A,T,C or G
gactggaagagcactgttcctcccgcaaaaatatataacccttagttggaggctcatcgttcctattcaggcagatgttatcgaggtccgacnnnnnnacataaaacctaaaaatcataataaattgatcggatacgcatgaggct

SEQ ID NO: 4909 - DNA, 146 bp, Artificial Sequence
  Bisulfite Padlock Probe
  misc_feature 92, 93, 94, 95, 96, 97: n = A,T,C or G
gactggaagagcactgttcctccctatcccgccactacaaaacgttggaggctcatcgttcctattcaggcagatgttatcgaggtccgacnnnnnnacgaaactaaccgtcacgttaacaaaaccgatcggatacgcatgaggct

SEQ ID NO: 4910 - DNA, 146 bp, Artificial Sequence
  Bisulfite Padlock Probe
  misc_feature 92, 93, 94, 95, 96, 97: n = A,T,C or G
gactggaagagcactgttcctccctatcccgccgctacaaaacgttggaggctcatcgttcctattcaggcagatgttatcgaggtccgacnnnnnnacgaaactaaccgtcacgttaacgaaaccgatcggatacgcatgaggct

SEQ ID NO: 4911 - DNA, 146 bp, Artificial Sequence
  Bisulfite Padlock Probe
  misc_feature 94, 95, 96, 97, 98, 99: n = A,T,C or G
gactggaagagcactgttcctccctctcctttcccacttctctctgttggaggctcatcgttcctattcaggcagatgttatcgaggtccgacnnnnnnaaaaactactacctcctttcccaaatcgatcggatacgcatgaggct

SEQ ID NO: 4912 - DNA, 146 bp, Artificial Sequence
  Bisulfite Padlock Probe
  misc_feature 93, 94, 95, 96, 97, 98: n = A,T,C or G
gactggaagagcactgttcctcccttccccaaacctccctaaacgttggaggctcatcgttcctattcaggcagatgttatcgaggtccgacnnnnnnataaatttactcaaaaatactttacctcgatcggatacgcatgaggct

SEQ ID NO: 4913 - DNA, 146 bp, Artificial Sequence
  Bisulfite Padlock Probe
  misc_feature 93, 94, 95, 96, 97, 98: n = A,T,C or G
gactggaagagcactgttcctcccttccccaaacctccctaaacgttggaggctcatcgttcctattcaggcagatgttatcgaggtccgacnnnnnnataaatttactcgaaaatactttacctcgatcggatacgcatgaggct

SEQ ID NO: 4914 - DNA, 146 bp, Artificial Sequence
  Bisulfite Padlock Probe
  misc_feature 93, 94, 95, 96, 97, 98: n = A,T,C or G
gactggaagagcactgttcctcccttcttatctatactaccctcgttggaggctcatcgttcctattcaggcagatgttatcgaggtccgacnnnnnncttacccgccctactcataccaaaccttgatcggatacgcatgaggct

SEQ ID NO: 4915 - DNA, 146 bp, Artificial Sequence
  Bisulfite Padlock Probe
  misc_feature 93, 94, 95, 96, 97, 98: n = A,T,C or G
gactggaagagcactgttcctcccttcttatctatactaccctcgttggaggctcatcgttcctattcaggcagatgttatcgaggtccgacnnnnnncttacccgccctactcataccgaaccttgatcggatacgcatgaggct

SEQ ID NO: 4916 - DNA, 146 bp, Artificial Sequence
  Bisulfite Padlock Probe
  misc_feature 95, 96, 97, 98, 99, 100: n = A,T,C or G
gactggaagagcactgttcctccgaactcctaaaacaactcataacgttggaggctcatcgttcctattcaggcagatgttatcgaggtccgacnnnnnnatatccgccacctacaactcaaacacgatcggatacgcatgaggct

SEQ ID NO: 4917 - DNA, 146 bp, Artificial Sequence
  Bisulfite Padlock Probe
  misc_feature 95, 96, 97, 98, 99, 100: n = A,T,C or G
gactggaagagcactgttcctccgaactcctaaaacaactcgtaacgttggaggctcatcgttcctattcaggcagatgttatcgaggtccgacnnnnnnatatccgccacctacaactcgaacacgatcggatacgcatgaggct

SEQ ID NO: 4918 - DNA, 146 bp, Artificial Sequence
  Bisulfite Padlock Probe
  misc_feature 95, 96, 97, 98, 99, 100: n = A,T,C or G
gactggaagagcactgttcctcctaatcttcccctctacttaaaaagttggaggctcatcgttcctattcaggcagatgttatcgaggtccgacnnnnnnaccaacgataaacgcaccaaacactcgatcggatacgcatgaggct

SEQ ID NO: 4919 - DNA, 146 bp, Artificial Sequence
  Bisulfite Padlock Probe
  misc_feature 95, 96, 97, 98, 99, 100: n = A,T,C or G
gactggaagagcactgttcctcctaatcttcccctctacttaaaaagttggaggctcatcgttcctattcaggcagatgttatcgaggtccgacnnnnnnaccaacgataaacgcgccaaacactcgatcggatacgcatgaggct

SEQ ID NO: 4920 - DNA, 146 bp, Artificial Sequence
  Bisulfite Padlock Probe
  misc_feature 92, 93, 94, 95, 96, 97: n = A,T,C or G
gactggaagagcactgttcctcctcccctctcaacccataaacgttggaggctcatcgttcctattcaggcagatgttatcgaggtccgacnnnnnntattaatccgcaaccaacattataaaatcgatcggatacgcatgaggct

SEQ ID NO: 4921 - DNA, 146 bp, Artificial Sequence
  Bisulfite Padlock Probe
  misc_feature 92, 93, 94, 95, 96, 97: n = A,T,C or G
gactggaagagcactgttcctcctcccctctcaacccgtaaacgttggaggctcatcgttcctattcaggcagatgttatcgaggtccgacnnnnnntattaatccgcaaccgacattataaaatcgatcggatacgcatgaggct

SEQ ID NO: 4922 - DNA, 146 bp, Artificial Sequence
  Bisulfite Padlock Probe
  misc_feature 92, 93, 94, 95, 96, 97: n = A,T,C or G
gactggaagagcactgttcctcctccttaccccctaaaaacccgttggaggctcatcgttcctattcaggcagatgttatcgaggtccgacnnnnnnccaaccccttctccaccataataaaactcgatcggatacgcatgaggct

SEQ ID NO: 4923 - DNA, 146 bp, Artificial Sequence
  Bisulfite Padlock Probe
  misc_feature 92, 93, 94, 95, 96, 97: n = A,T,C or G
gactggaagagcactgttcctcgaaaaacaaaaccaaaaaaccgttggaggctcatcgttcctattcaggcagatgttatcgaggtccgacnnnnnnctacgctaaaaccgaaacgcaacaaaaaagatcggatacgcatgaggct

SEQ ID NO: 4924 - DNA, 146 bp, Artificial Sequence
  Bisulfite Padlock Probe
  misc_feature 92, 93, 94, 95, 96, 97: n = A,T,C or G
gactggaagagcactgttcctcgaaaaacaaaaccgaaaaaccgttggaggctcatcgttcctattcaggcagatgttatcgaggtccgacnnnnnnctacgctaaaaccgaaacgcaacgaaaaagatcggatacgcatgaggct

SEQ ID NO: 4925 - DNA, 146 bp, Artificial Sequence
  Bisulfite Padlock Probe
  misc_feature 95, 96, 97, 98, 99, 100: n = A,T,C or G
gactggaagagcactgttcctcgaaatcaacccccaaaaacaaaaagttggaggctcatcgttcctattcaggcagatgttatcgaggtccgacnnnnnnaacgaaaaatttaaatttccgcaaacgatcggatacgcatgaggct

SEQ ID NO: 4926 - DNA, 146 bp, Artificial Sequence
  Bisulfite Padlock Probe
  misc_feature 95, 96, 97, 98, 99, 100: n = A,T,C or G
gactggaagagcactgttcctcgaaatcaacccccgaaaacaaaaagttggaggctcatcgttcctattcaggcagatgttatcgaggtccgacnnnnnnaacgaaaaatttaaatttccgcgaacgatcggatacgcatgaggct

SEQ ID NO: 4927 - DNA, 146 bp, Artificial Sequence
  Bisulfite Padlock Probe
  misc_feature 96, 97, 98, 99, 100, 101: n = A,T,C or G
gactggaagagcactgttcctcgacccaaaactacaaattctacaacgttggaggctcatcgttcctattcaggcagatgttatcgaggtccgacnnnnnnacaacctcaaaacctaccgctcctcgatcggatacgcatgaggct

SEQ ID NO: 4928 - DNA, 146 bp, Artificial Sequence
  Bisulfite Padlock Probe
  misc_feature 92, 93, 94, 95, 96, 97: n = A,T,C or G
gactggaagagcactgttcctcgacccaacctacaaaatccccgttggaggctcatcgttcctattcaggcagatgttatcgaggtccgacnnnnnnaattaaaaacgcaaaaccccaaattcctcgatcggatacgcatgaggct

SEQ ID NO: 4929 - DNA, 146 bp, Artificial Sequence
  Bisulfite Padlock Probe
  misc_feature 92, 93, 94, 95, 96, 97: n = A,T,C or G
gactggaagagcactgttcctcgacccgacctacaaaatccccgttggaggctcatcgttcctattcaggcagatgttatcgaggtccgacnnnnnnaattaaaaacgcaaaaccccgaattcctcgatcggatacgcatgaggct

SEQ ID NO: 4930 - DNA, 146 bp, Artificial Sequence
  Bisulfite Padlock Probe
  misc_feature 92, 93, 94, 95, 96, 97: n = A,T,C or G
gactggaagagcactgttcctcgatacgaacctacgacaacccgttggaggctcatcgttcctattcaggcagatgttatcgaggtccgacnnnnnnacataccgccgtacttctaacgcaaaatcgatcggatacgcatgaggct

SEQ ID NO: 4931 - DNA, 146 bp, Artificial Sequence
  Bisulfite Padlock Probe
  misc_feature 92, 93, 94, 95, 96, 97: n = A,T,C or G
gactggaagagcactgttcctcgatacgaacctacgacgacccgttggaggctcatcgttcctattcaggcagatgttatcgaggtccgacnnnnnnacataccgccgtacttctaacgcgaaatcgatcggatacgcatgaggct

SEQ ID NO: 4932 - DNA, 146 bp, Artificial Sequence
  Bisulfite Padlock Probe
  misc_feature 95, 96, 97, 98, 99, 100: n = A,T,C or G
gactggaagagcactgttcctcgctcaataaaaataaatctaaaaagttggaggctcatcgttcctattcaggcagatgttatcgaggtccgacnnnnnntaaccgaaaacttcaacttcaacttcgatcggatacgcatgaggct

SEQ ID NO: 4933 - DNA, 146 bp, Artificial Sequence
  Bisulfite Padlock Probe
  misc_feature 92, 93, 94, 95, 96, 97: n = A,T,C or G
gactggaagagcactgttcctcgctcctcacaaaccatcctacgttggaggctcatcgttcctattcaggcagatgttatcgaggtccgacnnnnnnaaaactccaaacgacgactaaacacatcagatcggatacgcatgaggct

SEQ ID NO: 4934 - DNA, 146 bp, Artificial Sequence
  Bisulfite Padlock Probe
  misc_feature 92, 93, 94, 95, 96, 97: n = A,T,C or G
gactggaagagcactgttcctcgctcctcgcaaaccatcctacgttggaggctcatcgttcctattcaggcagatgttatcgaggtccgacnnnnnnaaaactccaaacgacgactaaacgcatcagatcggatacgcatgaggct

SEQ ID NO: 4935 - DNA, 146 bp, Artificial Sequence
  Bisulfite Padlock Probe
  misc_feature 95, 96, 97, 98, 99, 100: n = A,T,C or G
gactggaagagcactgttcctcgctcgataaaaataaatctaaaaagttggaggctcatcgttcctattcaggcagatgttatcgaggtccgacnnnnnntaaccgaaaacttcgacttcaacttcgatcggatacgcatgaggct

SEQ ID NO: 4936 - DNA, 146 bp, Artificial Sequence
  Bisulfite Padlock Probe
  misc_feature 93, 94, 95, 96, 97, 98: n = A,T,C or G
gactggaagagcactgttcctctacaaaacctcttctctacctcgttggaggctcatcgttcctattcaggcagatgttatcgaggtccgacnnnnnnccccaactcctactaaacaatcttactcgatcggatacgcatgaggct

SEQ ID NO: 4937 - DNA, 146 bp, Artificial Sequence
  Bisulfite Padlock Probe
  misc_feature 94, 95, 96, 97, 98, 99: n = A,T,C or G
gactggaagagcactgttcctctaccccaaaaactaccacaccacgttggaggctcatcgttcctattcaggcagatgttatcgaggtccgacnnnnnnaaactacaactcgaacaacaaatataagatcggatacgcatgaggct

SEQ ID NO: 4938 - DNA, 146 bp, Artificial Sequence
  Bisulfite Padlock Probe
  misc_feature 94, 95, 96, 97, 98, 99: n = A,T,C or G
gactggaagagcactgttcctctaccccaaaaactaccgcaccacgttggaggctcatcgttcctattcaggcagatgttatcgaggtccgacnnnnnnaaactacaactcgaacgacaaatataagatcggatacgcatgaggct

SEQ ID NO: 4939 - DNA, 146 bp, Artificial Sequence
  Bisulfite Padlock Probe
  misc_feature 96, 97, 98, 99, 100, 101: n = A,T,C or G
gactggaagagcactgttcctctacctcctccatttcctaccctctcgttggaggctcatcgttcctattcaggcagatgttatcgaggtccgacnnnnnncccaaaactctcccacaccctcctcgatcggatacgcatgaggct

SEQ ID NO: 4940 - DNA, 146 bp, Artificial Sequence
  Bisulfite Padlock Probe
  misc_feature 93, 94, 95, 96, 97, 98: n = A,T,C or G
gactggaagagcactgttcctctacgaaacctcttctctacctcgttggaggctcatcgttcctattcaggcagatgttatcgaggtccgacnnnnnnccccgactcctactaaacaatcttactcgatcggatacgcatgaggct

SEQ ID NO: 4941 - DNA, 146 bp, Artificial Sequence
  Bisulfite Padlock Probe
  misc_feature 92, 93, 94, 95, 96, 97: n = A,T,C or G
gactggaagagcactgttcctctcacttccctctaaaaactacgttggaggctcatcgttcctattcaggcagatgttatcgaggtccgacnnnnnnatacttttataaaatttaaacaaaacatcgatcggatacgcatgaggct

SEQ ID NO: 4942 - DNA, 146 bp, Artificial Sequence
  Bisulfite Padlock Probe
  misc_feature 95, 96, 97, 98, 99, 100: n = A,T,C or G
gactggaagagcactgttcctctcccaaaccaaaattccccttatcgttggaggctcatcgttcctattcaggcagatgttatcgaggtccgacnnnnnntaaaccgctcccgacctaaaccaaacgatcggatacgcatgaggct

SEQ ID NO: 4943 - DNA, 146 bp, Artificial Sequence
  Bisulfite Padlock Probe
  misc_feature 95, 96, 97, 98, 99, 100: n = A,T,C or G
gactggaagagcactgttcctctcccaaaccgaaattccccttatcgttggaggctcatcgttcctattcaggcagatgttatcgaggtccgacnnnnnntaaaccgctcccgacctaaaccgaacgatcggatacgcatgaggct

SEQ ID NO: 4944 - DNA, 146 bp, Artificial Sequence
  Bisulfite Padlock Probe
  misc_feature 92, 93, 94, 95, 96, 97: n = A,T,C or G
gactggaagagcactgttcctctcgcttccctctaaaaactacgttggaggctcatcgttcctattcaggcagatgttatcgaggtccgacnnnnnnatacttttataaaatttaaacaaaacatcgatcggatacgcatgaggct

SEQ ID NO: 4945 - DNA, 146 bp, Artificial Sequence
  Bisulfite Padlock Probe
  misc_feature 94, 95, 96, 97, 98, 99: n = A,T,C or G
gactggaagagcactgttcctctctaaattacaaatcacatttacgttggaggctcatcgttcctattcaggcagatgttatcgaggtccgacnnnnnnacttacccaaaactaaaactacctatcgatcggatacgcatgaggct

SEQ ID NO: 4946 - DNA, 146 bp, Artificial Sequence
  Bisulfite Padlock Probe
  misc_feature 94, 95, 96, 97, 98, 99: n = A,T,C or G
gactggaagagcactgttcctctctaaattacgaatcacatttacgttggaggctcatcgttcctattcaggcagatgttatcgaggtccgacnnnnnnacttacccgaaactaaaactacctatcgatcggatacgcatgaggct

SEQ ID NO: 4947 - DNA, 146 bp, Artificial Sequence
  Bisulfite Padlock Probe
  misc_feature 94, 95, 96, 97, 98, 99: n = A,T,C or G
gactggaagagcactgttcctcttaatcccctccctattatacccgttggaggctcatcgttcctattcaggcagatgttatcgaggtccgacnnnnnntaaccactccattccctacctatccccgatcggatacgcatgaggct

SEQ ID NO: 4948 - DNA, 146 bp, Artificial Sequence
  Bisulfite Padlock Probe
  misc_feature 94, 95, 96, 97, 98, 99: n = A,T,C or G
gactggaagagcactgttcctcttaatcccctccctattatacccgttggaggctcatcgttcctattcaggcagatgttatcgaggtccgacnnnnnntaaccactccgttccctacctatccccgatcggatacgcatgaggct

SEQ ID NO: 4949 - DNA, 146 bp, Artificial Sequence
  Bisulfite Padlock Probe
  misc_feature 92, 93, 94, 95, 96, 97: n = A,T,C or G
gactggaagagcactgttcctcttcccaaactctaactatctcgttggaggctcatcgttcctattcaggcagatgttatcgaggtccgacnnnnnngctactaacctttccccctaaacaaaaaagatcggatacgcatgaggct

SEQ ID NO: 4950 - DNA, 146 bp, Artificial Sequence
  Bisulfite Padlock Probe
  misc_feature 92, 93, 94, 95, 96, 97: n = A,T,C or G
gactggaagagcactgttcctcttcccaaactctaactatctcgttggaggctcatcgttcctattcaggcagatgttatcgaggtccgacnnnnnngctactaacctttccccctaaacgaaaaagatcggatacgcatgaggct

SEQ ID NO: 4951 - DNA, 146 bp, Artificial Sequence
  Bisulfite Padlock Probe
  misc_feature 96, 97, 98, 99, 100, 101: n = A,T,C or G
gactggaagagcactgttcctcttcctctttctccaactacaactccgttggaggctcatcgttcctattcaggcagatgttatcgaggtccgacnnnnnnatcgctccccataatccccaaaaccgatcggatacgcatgaggct

SEQ ID NO: 4952 - DNA, 146 bp, Artificial Sequence
  Bisulfite Padlock Probe
  misc_feature 96, 97, 98, 99, 100, 101: n = A,T,C or G
gactggaagagcactgttcctcttcctctttctccgactacaactccgttggaggctcatcgttcctattcaggcagatgttatcgaggtccgacnnnnnnatcgctccccataatccccgaaaccgatcggatacgcatgaggct

SEQ ID NO: 4953 - DNA, 146 bp, Artificial Sequence
  Bisulfite Padlock Probe
  misc_feature 96, 97, 98, 99, 100, 101: n = A,T,C or G
gactggaagagcactgttcctcttctccaaaatctctcctctaactcgttggaggctcatcgttcctattcaggcagatgttatcgaggtccgacnnnnnncctcaacccccaccccacaatataagatcggatacgcatgaggct

SEQ ID NO: 4954 - DNA, 146 bp, Artificial Sequence
  Bisulfite Padlock Probe
  misc_feature 96, 97, 98, 99, 100, 101: n = A,T,C or G
gactggaagagcactgttcctcttctccgaaatctctcctctaactcgttggaggctcatcgttcctattcaggcagatgttatcgaggtccgacnnnnnncctcaacccccaccccgcaatataagatcggatacgcatgaggct

SEQ ID NO: 4955 - DNA, 146 bp, Artificial Sequence
  Bisulfite Padlock Probe
  misc_feature 92, 93, 94, 95, 96, 97: n = A,T,C or G
gactggaagagcactgttccttacccaaaaactctacaaaaaagttggaggctcatcgttcctattcaggcagatgttatcgaggtccgacnnnnnnccctcaaaaccttaataacaaacacccccgatcggatacgcatgaggct

SEQ ID NO: 4956 - DNA, 146 bp, Artificial Sequence
  Bisulfite Padlock Probe
  misc_feature 92, 93, 94, 95, 96, 97: n = A,T,C or G
gactggaagagcactgttccttacccaaaaactctacgaaaaagttggaggctcatcgttcctattcaggcagatgttatcgaggtccgacnnnnnnccctcaaaaccttaataacaaacacccccgatcggatacgcatgaggct

SEQ ID NO: 4957 - DNA, 146 bp, Artificial Sequence
  Bisulfite Padlock Probe
  misc_feature 93, 94, 95, 96, 97, 98: n = A,T,C or G
gactggaagagcactgttccttatttaccgcccgtacaacctacgttggaggctcatcgttcctattcaggcagatgttatcgaggtccgacnnnnnnaactcaacatcgaaccgaaaccaaaaaagatcggatacgcatgaggct

SEQ ID NO: 4958 - DNA, 146 bp, Artificial Sequence
  Bisulfite Padlock Probe
  misc_feature 93, 94, 95, 96, 97, 98: n = A,T,C or G
gactggaagagcactgttccttatttaccgcccgtacgacctacgttggaggctcatcgttcctattcaggcagatgttatcgaggtccgacnnnnnnaactcaacatcgaaccgaaaccgaaaaagatcggatacgcatgaggct

SEQ ID NO: 4959 - DNA, 146 bp, Artificial Sequence
  Bisulfite Padlock Probe
  misc_feature 94, 95, 96, 97, 98, 99: n = A,T,C or G
gactggaagagcactgttccttcaaccacgaccaaaactaaactcgttggaggctcatcgttcctattcaggcagatgttatcgaggtccgacnnnnnnaaaataaaaataccccacaatcctaccgatcggatacgcatgaggct

SEQ ID NO: 4960 - DNA, 146 bp, Artificial Sequence
  Bisulfite Padlock Probe
  misc_feature 94, 95, 96, 97, 98, 99: n = A,T,C or G
gactggaagagcactgttccttcaaccacgaccgaaactaaactcgttggaggctcatcgttcctattcaggcagatgttatcgaggtccgacnnnnnnaaaataaaaataccccgcaatcctaccgatcggatacgcatgaggct

SEQ ID NO: 4961 - DNA, 146 bp, Artificial Sequence
  Bisulfite Padlock Probe
  misc_feature 96, 97, 98, 99, 100, 101: n = A,T,C or G
gactggaagagcactgttccttcccgctccctcaactaaaaacaaaagttggaggctcatcgttcctattcaggcagatgttatcgaggtccgacnnnnnnaaccaataatacaaaatcactaaacgatcggatacgcatgaggct

SEQ ID NO: 4962 - DNA, 146 bp, Artificial Sequence
  Bisulfite Padlock Probe
  misc_feature 96, 97, 98, 99, 100, 101: n = A,T,C or G
gactggaagagcactgttccttcccgctccctcgactaaaaacaaaagttggaggctcatcgttcctattcaggcagatgttatcgaggtccgacnnnnnnaaccaataatacaaaatcgctaaacgatcggatacgcatgaggct

SEQ ID NO: 4963 - DNA, 146 bp, Artificial Sequence
  Bisulfite Padlock Probe
  misc_feature 92, 93, 94, 95, 96, 97: n = A,T,C or G
gactggaagagcactgttccttcctactcatcctaatatacacgttggaggctcatcgttcctattcaggcagatgttatcgaggtccgacnnnnnnctttactactaataatcatctaaaccctcgatcggatacgcatgaggct

SEQ ID NO: 4964 - DNA, 146 bp, Artificial Sequence
  Bisulfite Padlock Probe
  misc_feature 92, 93, 94, 95, 96, 97: n = A,T,C or G
gactggaagagcactgttccttcctactcatcctaatatacacgttggaggctcatcgttcctattcaggcagatgttatcgaggtccgacnnnnnnctttactactaataatcgtctaaaccctcgatcggatacgcatgaggct

SEQ ID NO: 4965 - DNA, 146 bp, Artificial Sequence
  Bisulfite Padlock Probe
  misc_feature 94, 95, 96, 97, 98, 99: n = A,T,C or G
gactggaagagcactgttccttcgccgactcacaaaacaactatagttggaggctcatcgttcctattcaggcagatgttatcgaggtccgacnnnnnntcccccatataaacccacaaaaataccgatcggatacgcatgaggct

SEQ ID NO: 4966 - DNA, 146 bp, Artificial Sequence
  Bisulfite Padlock Probe
  misc_feature 94, 95, 96, 97, 98, 99: n = A,T,C or G
gactggaagagcactgttccttcgccgactcacaaaacgactatagttggaggctcatcgttcctattcaggcagatgttatcgaggtccgacnnnnnntcccccgtataaacccacaaaaataccgatcggatacgcatgaggct

SEQ ID NO: 4967 - DNA, 146 bp, Artificial Sequence
  Bisulfite Padlock Probe
  misc_feature 92, 93, 94, 95, 96, 97: n = A,T,C or G
gactggaagagcactgttccttctactccccgcacaaccttacgttggaggctcatcgttcctattcaggcagatgttatcgaggtccgacnnnnnncccacttacaacaaatctacatcttaattgatcggatacgcatgaggct

SEQ ID NO: 4968 - DNA, 146 bp, Artificial Sequence
  Bisulfite Padlock Probe
  misc_feature 92, 93, 94, 95, 96, 97: n = A,T,C or G
gactggaagagcactgttccttctactccccgcgcaaccttacgttggaggctcatcgttcctattcaggcagatgttatcgaggtccgacnnnnnncccacttacaacgaatctacatcttaattgatcggatacgcatgaggct

SEQ ID NO: 4969 - DNA, 146 bp, Artificial Sequence
  Bisulfite Padlock Probe
  misc_feature 92, 93, 94, 95, 96, 97: n = A,T,C or G
gactggaagagcactgttccttctcccctatttatatttcctcgttggaggctcatcgttcctattcaggcagatgttatcgaggtccgacnnnnnnaaaaactacctaatatccgccaaaccaaagatcggatacgcatgaggct

SEQ ID NO: 4970 - DNA, 146 bp, Artificial Sequence
  Bisulfite Padlock Probe
  misc_feature 92, 93, 94, 95, 96, 97: n = A,T,C or G
gactggaagagcactgttccttctcccctatttatatttcctcgttggaggctcatcgttcctattcaggcagatgttatcgaggtccgacnnnnnnaaaaactacctaatatccgccgaaccaaagatcggatacgcatgaggct

SEQ ID NO: 4971 - DNA, 146 bp, Artificial Sequence
  Bisulfite Padlock Probe
  misc_feature 93, 94, 95, 96, 97, 98: n = A,T,C or G
gactggaagagcactgttccttcttccgctacatacaccaacccgttggaggctcatcgttcctattcaggcagatgttatcgaggtccgacnnnnnncgaacttcacgaacaaactaccaaccacgatcggatacgcatgaggct

SEQ ID NO: 4972 - DNA, 146 bp, Artificial Sequence
  Bisulfite Padlock Probe
  misc_feature 93, 94, 95, 96, 97, 98: n = A,T,C or G
gactggaagagcactgttccttcttccgctacatacgccaacccgttggaggctcatcgttcctattcaggcagatgttatcgaggtccgacnnnnnncgaacttcacgaacaaactaccgaccacgatcggatacgcatgaggct

SEQ ID NO: 4973 - DNA, 146 bp, Artificial Sequence
  Bisulfite Padlock Probe
  misc_feature 92, 93, 94, 95, 96, 97: n = A,T,C or G
gactggaagagcactgttcctttaaaacccgcgtcaacaaaacgttggaggctcatcgttcctattcaggcagatgttatcgaggtccgacnnnnnnaaaaccccaacactatcttcaatctccacgatcggatacgcatgaggct

SEQ ID NO: 4974 - DNA, 146 bp, Artificial Sequence
  Bisulfite Padlock Probe
  misc_feature 92, 93, 94, 95, 96, 97: n = A,T,C or G
gactggaagagcactgttcctttaaaacccgcgtcgacaaaacgttggaggctcatcgttcctattcaggcagatgttatcgaggtccgacnnnnnnaaaaccccaacgctatcttcaatctccacgatcggatacgcatgaggct

SEQ ID NO: 4975 - DNA, 146 bp, Artificial Sequence
  Bisulfite Padlock Probe
  misc_feature 95, 96, 97, 98, 99, 100: n = A,T,C or G
gactggaagagcactgttcctttaactaatatcttccataaccctcgttggaggctcatcgttcctattcaggcagatgttatcgaggtccgacnnnnnnccctcaaaaatatttatttatttaaagatcggatacgcatgaggct

SEQ ID NO: 4976 - DNA, 146 bp, Artificial Sequence
  Bisulfite Padlock Probe
  misc_feature 95, 96, 97, 98, 99, 100: n = A,T,C or G
gactggaagagcactgttcctttaactaatatcttccgtaaccctcgttggaggctcatcgttcctattcaggcagatgttatcgaggtccgacnnnnnnccctcgaaaatatttatttatttaaagatcggatacgcatgaggct

SEQ ID NO: 4977 - DNA, 146 bp, Artificial Sequence
  Bisulfite Padlock Probe
  misc_feature 96, 97, 98, 99, 100, 101: n = A,T,C or G
gactggaagagcactgttcctttacaaaataactcgcaaaaatccccgttggaggctcatcgttcctattcaggcagatgttatcgaggtccgacnnnnnntacgaaacaaaatattcttcaaaaagatcggatacgcatgaggct

SEQ ID NO: 4978 - DNA, 146 bp, Artificial Sequence
  Bisulfite Padlock Probe
  misc_feature 96, 97, 98, 99, 100, 101: n = A,T,C or G
gactggaagagcactgttcctttacaaaataactcgcgaaaatccccgttggaggctcatcgttcctattcaggcagatgttatcgaggtccgacnnnnnntacgaaacgaaatattcttcaaaaagatcggatacgcatgaggct

SEQ ID NO: 4979 - DNA, 146 bp, Artificial Sequence
  Bisulfite Padlock Probe
  misc_feature 92, 93, 94, 95, 96, 97: n = A,T,C or G
gactggaagagcactgttcctttatacccaatcctaaaaacccgttggaggctcatcgttcctattcaggcagatgttatcgaggtccgacnnnnnntttttctaaaaatttaaaattatttaaaagatcggatacgcatgaggct

SEQ ID NO: 4980 - DNA, 146 bp, Artificial Sequence
  Bisulfite Padlock Probe
  misc_feature 92, 93, 94, 95, 96, 97: n = A,T,C or G
gactggaagagcactgttcctttatacccgatcctaaaaacccgttggaggctcatcgttcctattcaggcagatgttatcgaggtccgacnnnnnntttttctaaaaatttaaaattatttaaaagatcggatacgcatgaggct

SEQ ID NO: 4981 - DNA, 146 bp, Artificial Sequence
  Bisulfite Padlock Probe
  misc_feature 93, 94, 95, 96, 97, 98: n = A,T,C or G
gactggaagagcactgttcctttcatccttcccactccaaactcgttggaggctcatcgttcctattcaggcagatgttatcgaggtccgacnnnnnnaaaaccgacgaaaaactacactcaacccgatcggatacgcatgaggct

SEQ ID NO: 4982 - DNA, 146 bp, Artificial Sequence
  Bisulfite Padlock Probe
  misc_feature 93, 94, 95, 96, 97, 98: n = A,T,C or G
gactggaagagcactgttcctttcatccttcccgctccaaactcgttggaggctcatcgttcctattcaggcagatgttatcgaggtccgacnnnnnnaaaaccgacgaaaaactacgctcaacccgatcggatacgcatgaggct

SEQ ID NO: 4983 - DNA, 146 bp, Artificial Sequence
  Bisulfite Padlock Probe
  misc_feature 95, 96, 97, 98, 99, 100: n = A,T,C or G
gactggaagagcactgttcctttcgataaccctaatttcgacgcacgttggaggctcatcgttcctattcaggcagatgttatcgaggtccgacnnnnnnctacgcccccgaactaacccataaacgatcggatacgcatgaggct

SEQ ID NO: 4984 - DNA, 146 bp, Artificial Sequence
  Bisulfite Padlock Probe
  misc_feature 95, 96, 97, 98, 99, 100: n = A,T,C or G
gactggaagagcactgttcctttcgataaccctaatttcgacgcgcgttggaggctcatcgttcctattcaggcagatgttatcgaggtccgacnnnnnnctacgcccccgaactaacccgtaaacgatcggatacgcatgaggct

SEQ ID NO: 4985 - DNA, 146 bp, Artificial Sequence
  Bisulfite Padlock Probe
  misc_feature 94, 95, 96, 97, 98, 99: n = A,T,C or G
gactggaagagcactgttcctttctcgaaatacccattcaacaacgttggaggctcatcgttcctattcaggcagatgttatcgaggtccgacnnnnnnaaaaacgactacaaaaatctcattaacgatcggatacgcatgaggct

SEQ ID NO: 4986 - DNA, 146 bp, Artificial Sequence
  Bisulfite Padlock Probe
  misc_feature 94, 95, 96, 97, 98, 99: n = A,T,C or G
gactggaagagcactgttcctttctcgaaatacccattcaacgacgttggaggctcatcgttcctattcaggcagatgttatcgaggtccgacnnnnnnaaaaacgactacgaaaatctcattaacgatcggatacgcatgaggct

SEQ ID NO: 4987 - DNA, 146 bp, Artificial Sequence
  Bisulfite Padlock Probe
  misc_feature 92, 93, 94, 95, 96, 97: n = A,T,C or G
gactggaagagcactgttcgaaaaacgccaacgcgacaaaaaagttggaggctcatcgttcctattcaggcagatgttatcgaggtccgacnnnnnnatactccaaaaacctccgaaactccaaccgatcggatacgcatgaggct

SEQ ID NO: 4988 - DNA, 146 bp, Artificial Sequence
  Bisulfite Padlock Probe
  misc_feature 92, 93, 94, 95, 96, 97: n = A,T,C or G
gactggaagagcactgttcgaaaaacgccaacgcgacgaaaaagttggaggctcatcgttcctattcaggcagatgttatcgaggtccgacnnnnnnatactccaaaaacctccgaaactccgaccgatcggatacgcatgaggct

SEQ ID NO: 4989 - DNA, 146 bp, Artificial Sequence
  Bisulfite Padlock Probe
  misc_feature 93, 94, 95, 96, 97, 98: n = A,T,C or G
gactggaagagcactgttcgaaaaatcaaactcctaataaaatcgttggaggctcatcgttcctattcaggcagatgttatcgaggtccgacnnnnnnaaacgctaataccatctaccaaaaacccgatcggatacgcatgaggct

SEQ ID NO: 4990 - DNA, 146 bp, Artificial Sequence
  Bisulfite Padlock Probe
  misc_feature 92, 93, 94, 95, 96, 97: n = A,T,C or G
gactggaagagcactgttcgaaaaatccgccgaacgcaaaaaagttggaggctcatcgttcctattcaggcagatgttatcgaggtccgacnnnnnncgaaataaacgaccgcccaacactaaaaagatcggatacgcatgaggct

SEQ ID NO: 4991 - DNA, 146 bp, Artificial Sequence
  Bisulfite Padlock Probe
  misc_feature 92, 93, 94, 95, 96, 97: n = A,T,C or G
gactggaagagcactgttcgaaaaatccgccgaacgcgaaaaagttggaggctcatcgttcctattcaggcagatgttatcgaggtccgacnnnnnncgaaataaacgaccgcccaacgctaaaaagatcggatacgcatgaggct

SEQ ID NO: 4992 - DNA, 146 bp, Artificial Sequence
  Bisulfite Padlock Probe
  misc_feature 93, 94, 95, 96, 97, 98: n = A,T,C or G
gactggaagagcactgttcgaaaaatcgaactcctaataaaatcgttggaggctcatcgttcctattcaggcagatgttatcgaggtccgacnnnnnnaaacgctaataccatctaccgaaaacccgatcggatacgcatgaggct

SEQ ID NO: 4993 - DNA, 146 bp, Artificial Sequence
  Bisulfite Padlock Probe
  misc_feature 94, 95, 96, 97, 98, 99: n = A,T,C or G
gactggaagagcactgttcgaaaacaaaatatctattattattacgttggaggctcatcgttcctattcaggcagatgttatcgaggtccgacnnnnnnaaaaacctcacttcccccactacccacgatcggatacgcatgaggct

SEQ ID NO: 4994 - DNA, 146 bp, Artificial Sequence
  Bisulfite Padlock Probe
  misc_feature 95, 96, 97, 98, 99, 100: n = A,T,C or G
gactggaagagcactgttcgaaaaccacaaaaattatttacaaaaagttggaggctcatcgttcctattcaggcagatgttatcgaggtccgacnnnnnnaacaaaaacaaatttaaaaattacccgatcggatacgcatgaggct

SEQ ID NO: 4995 - DNA, 146 bp, Artificial Sequence
  Bisulfite Padlock Probe
  misc_feature 93, 94, 95, 96, 97, 98: n = A,T,C or G
gactggaagagcactgttcgaaaaccaccaatccaaaaacctacgttggaggctcatcgttcctattcaggcagatgttatcgaggtccgacnnnnnnaaaaacgacctaaacatataattccaacgatcggatacgcatgaggct

SEQ ID NO: 4996 - DNA, 146 bp, Artificial Sequence
  Bisulfite Padlock Probe
  misc_feature 93, 94, 95, 96, 97, 98: n = A,T,C or G
gactggaagagcactgttcgaaaaccaccaatccgaaaacctacgttggaggctcatcgttcctattcaggcagatgttatcgaggtccgacnnnnnnaaaaacgacctaaacgtataattccaacgatcggatacgcatgaggct

SEQ ID NO: 4997 - DNA, 146 bp, Artificial Sequence
  Bisulfite Padlock Probe
  misc_feature 93, 94, 95, 96, 97, 98: n = A,T,C or G
gactggaagagcactgttcgaaaaccctcgctccaaaataaaacgttggaggctcatcgttcctattcaggcagatgttatcgaggtccgacnnnnnnttaaacgtacgtcacaaaacaatactaagatcggatacgcatgaggct

SEQ ID NO: 4998 - DNA, 146 bp, Artificial Sequence
  Bisulfite Padlock Probe
  misc_feature 93, 94, 95, 96, 97, 98: n = A,T,C or G
gactggaagagcactgttcgaaaaccctcgctccgaaataaaacgttggaggctcatcgttcctattcaggcagatgttatcgaggtccgacnnnnnnttaaacgtacgtcgcaaaacaatactaagatcggatacgcatgaggct

SEQ ID NO: 4999 - DNA, 146 bp, Artificial Sequence
  Bisulfite Padlock Probe
  misc_feature 95, 96, 97, 98, 99, 100: n = A,T,C or G
gactggaagagcactgttcgaaaaccgcaaaaattatttacaaaaagttggaggctcatcgttcctattcaggcagatgttatcgaggtccgacnnnnnnaacaaaaacgaatttaaaaattacccgatcggatacgcatgaggct

SEQ ID NO: 5000 - DNA, 146 bp, Artificial Sequence
  Bisulfite Padlock Probe
  misc_feature 92, 93, 94, 95, 96, 97: n = A,T,C or G
gactggaagagcactgttcgaaaacgaacgcgaaaccaaaaaagttggaggctcatcgttcctattcaggcagatgttatcgaggtccgacnnnnnnataaaaatcctcgataataaacatataaagatcggatacgcatgaggct

SEQ ID NO: 5001 - DNA, 146 bp, Artificial Sequence
  Bisulfite Padlock Probe
  misc_feature 92, 93, 94, 95, 96, 97: n = A,T,C or G
gactggaagagcactgttcgaaaacgaacgcgaaaccgaaaaagttggaggctcatcgttcctattcaggcagatgttatcgaggtccgacnnnnnnataaaaatcctcgataataaacgtataaagatcggatacgcatgaggct

SEQ ID NO: 5002 - DNA, 146 bp, Artificial Sequence
  Bisulfite Padlock Probe
  misc_feature 93, 94, 95, 96, 97, 98: n = A,T,C or G
gactggaagagcactgttcgaaaacgcactaaaacccctaaaaagttggaggctcatcgttcctattcaggcagatgttatcgaggtccgacnnnnnnatatttactttcacaccgaaacaacaaagatcggatacgcatgaggct

SEQ ID NO: 5003 - DNA, 146 bp, Artificial Sequence
  Bisulfite Padlock Probe
  misc_feature 93, 94, 95, 96, 97, 98: n = A,T,C or G
gactggaagagcactgttcgaaaacgcgaaacactcaaccaaacgttggaggctcatcgttcctattcaggcagatgttatcgaggtccgacnnnnnngacgacgaaaccgatcgataacccaaacgatcggatacgcatgaggct

SEQ ID NO: 5004 - DNA, 146 bp, Artificial Sequence
  Bisulfite Padlock Probe
  misc_feature 93, 94, 95, 96, 97, 98: n = A,T,C or G
gactggaagagcactgttcgaaaacgcgaaacgctcaaccaaacgttggaggctcatcgttcctattcaggcagatgttatcgaggtccgacnnnnnngacgacgaaaccgatcgataacccgaacgatcggatacgcatgaggct

SEQ ID NO: 5005 - DNA, 146 bp, Artificial Sequence
  Bisulfite Padlock Probe
  misc_feature 93, 94, 95, 96, 97, 98: n = A,T,C or G
gactggaagagcactgttcgaaaacgcgctaaaacccctaaaaagttggaggctcatcgttcctattcaggcagatgttatcgaggtccgacnnnnnnatatttactttcacaccgaaacgacaaagatcggatacgcatgaggct

SEQ ID NO: 5006 - DNA, 146 bp, Artificial Sequence
  Bisulfite Padlock Probe
  misc_feature 95, 96, 97, 98, 99, 100: n = A,T,C or G
gactggaagagcactgttcgaaaactacccatacccacacctaaccgttggaggctcatcgttcctattcaggcagatgttatcgaggtccgacnnnnnnactcccccaacgaacgctacaaaaaagatcggatacgcatgaggct

SEQ ID NO: 5007 - DNA, 146 bp, Artificial Sequence
  Bisulfite Padlock Probe
  misc_feature 95, 96, 97, 98, 99, 100: n = A,T,C or G
gactggaagagcactgttcgaaaactacccatacccgcacctaaccgttggaggctcatcgttcctattcaggcagatgttatcgaggtccgacnnnnnnactcccccaacgaacgctacgaaaaagatcggatacgcatgaggct

SEQ ID NO: 5008 - DNA, 146 bp, Artificial Sequence
  Bisulfite Padlock Probe
  misc_feature 93, 94, 95, 96, 97, 98: n = A,T,C or G
gactggaagagcactgttcgaaaattcctctattactctaaaaagttggaggctcatcgttcctattcaggcagatgttatcgaggtccgacnnnnnnaaaaacccgacttcgacaacacttaacagatcggatacgcatgaggct

SEQ ID NO: 5009 - DNA, 146 bp, Artificial Sequence
  Bisulfite Padlock Probe
  misc_feature 94, 95, 96, 97, 98, 99: n = A,T,C or G
gactggaagagcactgttcgaaacaaaaacaacacacacaaacctgttggaggctcatcgttcctattcaggcagatgttatcgaggtccgacnnnnnncccccaaaaacacctaaaacttaaaaagatcggatacgcatgaggct

SEQ ID NO: 5010 - DNA, 146 bp, Artificial Sequence
  Bisulfite Padlock Probe
  misc_feature 94, 95, 96, 97, 98, 99: n = A,T,C or G
gactggaagagcactgttcgaaacaaaaacaacgcacacaaacctgttggaggctcatcgttcctattcaggcagatgttatcgaggtccgacnnnnnncccccaaaaacgcctaaaacttaaaaagatcggatacgcatgaggct

SEQ ID NO: 5011 - DNA, 146 bp, Artificial Sequence
  Bisulfite Padlock Probe
  misc_feature 92, 93, 94, 95, 96, 97: n = A,T,C or G
gactggaagagcactgttcgaaacaaactacccaaaaacaaccgttggaggctcatcgttcctattcaggcagatgttatcgaggtccgacnnnnnnaaataatttcctcgtccaactcgcccaacgatcggatacgcatgaggct

SEQ ID NO: 5012 - DNA, 146 bp, Artificial Sequence
  Bisulfite Padlock Probe
  misc_feature 95, 96, 97, 98, 99, 100: n = A,T,C or G
gactggaagagcactgttcgaaaccgacgcacaaaataaaccctaagttggaggctcatcgttcctattcaggcagatgttatcgaggtccgacnnnnnntacaaaacgacgacgaaaacgcaaaagatcggatacgcatgaggct

SEQ ID NO: 5013 - DNA, 146 bp, Artificial Sequence
  Bisulfite Padlock Probe
  misc_feature 95, 96, 97, 98, 99, 100: n = A,T,C or G
gactggaagagcactgttcgaaaccgacgcgcaaaataaaccctaagttggaggctcatcgttcctattcaggcagatgttatcgaggtccgacnnnnnntacaaaacgacgacgaaaacgcgaaagatcggatacgcatgaggct

SEQ ID NO: 5014 - DNA, 146 bp, Artificial Sequence
  Bisulfite Padlock Probe
  misc_feature 92, 93, 94, 95, 96, 97: n = A,T,C or G
gactggaagagcactgttcgaaacctacgcacctaaaccctacgttggaggctcatcgttcctattcaggcagatgttatcgaggtccgacnnnnnnacctaaaaatatcaaaaaataacaaaaacgatcggatacgcatgaggct

SEQ ID NO: 5015 - DNA, 146 bp, Artificial Sequence
  Bisulfite Padlock Probe
  misc_feature 92, 93, 94, 95, 96, 97: n = A,T,C or G
gactggaagagcactgttcgaaacctacgcgcctaaaccctacgttggaggctcatcgttcctattcaggcagatgttatcgaggtccgacnnnnnnacctaaaaatatcgaaaaataacaaaaacgatcggatacgcatgaggct

SEQ ID NO: 5016 - DNA, 146 bp, Artificial Sequence
  Bisulfite Padlock Probe
  misc_feature 92, 93, 94, 95, 96, 97: n = A,T,C or G
gactggaagagcactgttcgaaacgaactacccaaaaacaaccgttggaggctcatcgttcctattcaggcagatgttatcgaggtccgacnnnnnnaaataatttcctcgtccaactcgcccgacgatcggatacgcatgaggct

SEQ ID NO: 5017 - DNA, 146 bp, Artificial Sequence
  Bisulfite Padlock Probe
  misc_feature 92, 93, 94, 95, 96, 97: n = A,T,C or G
gactggaagagcactgttcgaaacgatacgcaccataatatccgttggaggctcatcgttcctattcaggcagatgttatcgaggtccgacnnnnnntaacctcgaactatacaacgacgacaaccgatcggatacgcatgaggct

SEQ ID NO: 5018 - DNA, 146 bp, Artificial Sequence
  Bisulfite Padlock Probe
  misc_feature 92, 93, 94, 95, 96, 97: n = A,T,C or G
gactggaagagcactgttcgaaacgatacgcgccataatatccgttggaggctcatcgttcctattcaggcagatgttatcgaggtccgacnnnnnntaacctcgaactatacaacgacgacgaccgatcggatacgcatgaggct

SEQ ID NO: 5019 - DNA, 146 bp, Artificial Sequence
  Bisulfite Padlock Probe
  misc_feature 96, 97, 98, 99, 100, 101: n = A,T,C or G
gactggaagagcactgttcgaaacgcgaaaacaacaaataaccaaacgttggaggctcatcgttcctattcaggcagatgttatcgaggtccgacnnnnnngaaaaccacatcccacccccaaaacgatcggatacgcatgaggct

SEQ ID NO: 5020 - DNA, 146 bp, Artificial Sequence
  Bisulfite Padlock Probe
  misc_feature 96, 97, 98, 99, 100, 101: n = A,T,C or G
gactggaagagcactgttcgaaacgcgaaaacaacgaataaccaaacgttggaggctcatcgttcctattcaggcagatgttatcgaggtccgacnnnnnngaaaaccgcatcccacccccaaaacgatcggatacgcatgaggct

SEQ ID NO: 5021 - DNA, 146 bp, Artificial Sequence
  Bisulfite Padlock Probe
  misc_feature 95, 96, 97, 98, 99, 100: n = A,T,C or G
gactggaagagcactgttcgaaactaaaaccacaaaaacaaaacccgttggaggctcatcgttcctattcaggcagatgttatcgaggtccgacnnnnnnaaaaactcacctatatacaaaacaccgatcggatacgcatgaggct

SEQ ID NO: 5022 - DNA, 146 bp, Artificial Sequence
  Bisulfite Padlock Probe
  misc_feature 95, 96, 97, 98, 99, 100: n = A,T,C or G
gactggaagagcactgttcgaaactaaaaccacgaaaacaaaacccgttggaggctcatcgttcctattcaggcagatgttatcgaggtccgacnnnnnnaaaaactcacctatatacaaaacgccgatcggatacgcatgaggct

SEQ ID NO: 5023 - DNA, 146 bp, Artificial Sequence
  Bisulfite Padlock Probe
  misc_feature 95, 96, 97, 98, 99, 100: n = A,T,C or G
gactggaagagcactgttcgaaactaaaccgaacgacgctaacaacgttggaggctcatcgttcctattcaggcagatgttatcgaggtccgacnnnnnnaaaaacacaacgccaaaccaaaactcgatcggatacgcatgaggct

SEQ ID NO: 5024 - DNA, 146 bp, Artificial Sequence
  Bisulfite Padlock Probe
  misc_feature 95, 96, 97, 98, 99, 100: n = A,T,C or G
gactggaagagcactgttcgaaactaaaccgaacgacgctaacgacgttggaggctcatcgttcctattcaggcagatgttatcgaggtccgacnnnnnnaaaaacacaacgccgaaccaaaactcgatcggatacgcatgaggct

SEQ ID NO: 5025 - DNA, 146 bp, Artificial Sequence
  Bisulfite Padlock Probe
  misc_feature 95, 96, 97, 98, 99, 100: n = A,T,C or G
gactggaagagcactgttcgaaactatcaacgaaacaaaatataacgttggaggctcatcgttcctattcaggcagatgttatcgaggtccgacnnnnnnaaactctctacgtccccgaaacaaacgatcggatacgcatgaggct

SEQ ID NO: 5026 - DNA, 146 bp, Artificial Sequence
  Bisulfite Padlock Probe
  misc_feature 95, 96, 97, 98, 99, 100: n = A,T,C or G
gactggaagagcactgttcgaaactatcaacgaaacgaaatataacgttggaggctcatcgttcctattcaggcagatgttatcgaggtccgacnnnnnnaaactctctacgtccccgaaacgaacgatcggatacgcatgaggct

SEQ ID NO: 5027 - DNA, 146 bp, Artificial Sequence
  Bisulfite Padlock Probe
  misc_feature 92, 93, 94, 95, 96, 97: n = A,T,C or G
gactggaagagcactgttcgaaactatcaacgcgatcaaaaaagttggaggctcatcgttcctattcaggcagatgttatcgaggtccgacnnnnnncaacacctacaaactaatattaaatccccgatcggatacgcatgaggct

SEQ ID NO: 5028 - DNA, 146 bp, Artificial Sequence
  Bisulfite Padlock Probe
  misc_feature 92, 93, 94, 95, 96, 97: n = A,T,C or G
gactggaagagcactgttcgaaactatcaacgcgatcgaaaaagttggaggctcatcgttcctattcaggcagatgttatcgaggtccgacnnnnnncaacacctacgaactaatattaaatccccgatcggatacgcatgaggct

SEQ ID NO: 5029 - DNA, 146 bp, Artificial Sequence
  Bisulfite Padlock Probe
  misc_feature 95, 96, 97, 98, 99, 100: n = A,T,C or G
gactggaagagcactgttcgaaataaaaactcacctcaactaaaaagttggaggctcatcgttcctattcaggcagatgttatcgaggtccgacnnnnnnacaataaaacgaaccgaaaccgacacgatcggatacgcatgaggct

SEQ ID NO: 5030 - DNA, 146 bp, Artificial Sequence
  Bisulfite Padlock Probe
  misc_feature 95, 96, 97, 98, 99, 100: n = A,T,C or G
gactggaagagcactgttcgaaataaaaactcacctcgactaaaaagttggaggctcatcgttcctattcaggcagatgttatcgaggtccgacnnnnnnacaataaaacgaaccgaaaccgacgcgatcggatacgcatgaggct

SEQ ID NO: 5031 - DNA, 146 bp, Artificial Sequence
  Bisulfite Padlock Probe
  misc_feature 94, 95, 96, 97, 98, 99: n = A,T,C or G
gactggaagagcactgttcgaaataatccccgacaccccaaaaacgttggaggctcatcgttcctattcaggcagatgttatcgaggtccgacnnnnnncctacgaaaaacgcaacacctaatcccgatcggatacgcatgaggct

SEQ ID NO: 5032 - DNA, 146 bp, Artificial Sequence
  Bisulfite Padlock Probe
  misc_feature 94, 95, 96, 97, 98, 99: n = A,T,C or G
gactggaagagcactgttcgaaataatccccgacaccccgaaaacgttggaggctcatcgttcctattcaggcagatgttatcgaggtccgacnnnnnncctacgaaaaacgcaacgcctaatcccgatcggatacgcatgaggct

SEQ ID NO: 5033 - DNA, 146 bp, Artificial Sequence
  Bisulfite Padlock Probe
  misc_feature 92, 93, 94, 95, 96, 97: n = A,T,C or G
gactggaagagcactgttcgaacaaaataacccactaaaacccgttggaggctcatcgttcctattcaggcagatgttatcgaggtccgacnnnnnnaaaccaaatctaacaaaaccatctatctcgatcggatacgcatgaggct

SEQ ID NO: 5034 - DNA, 146 bp, Artificial Sequence
  Bisulfite Padlock Probe
  misc_feature 92, 93, 94, 95, 96, 97: n = A,T,C or G
gactggaagagcactgttcgaacaaaataacccgctaaaacccgttggaggctcatcgttcctattcaggcagatgttatcgaggtccgacnnnnnnaaaccaaatctaacaaaaccatctatctcgatcggatacgcatgaggct

SEQ ID NO: 5035 - DNA, 146 bp, Artificial Sequence
  Bisulfite Padlock Probe
  misc_feature 93, 94, 95, 96, 97, 98: n = A,T,C or G
gactggaagagcactgttcgaacaacccctcactttcctaccccgttggaggctcatcgttcctattcaggcagatgttatcgaggtccgacnnnnnnaaatttctttcctccgaactacgaaaaagatcggatacgcatgaggct

SEQ ID NO: 5036 - DNA, 146 bp, Artificial Sequence
  Bisulfite Padlock Probe
  misc_feature 95, 96, 97, 98, 99, 100: n = A,T,C or G
gactggaagagcactgttcgaacaatcctaactactaaccaactaagttggaggctcatcgttcctattcaggcagatgttatcgaggtccgacnnnnnnaaaaacgactaccaaaaaccaaatccgatcggatacgcatgaggct

SEQ ID NO: 5037 - DNA, 146 bp, Artificial Sequence
  Bisulfite Padlock Probe
  misc_feature 95, 96, 97, 98, 99, 100: n = A,T,C or G
gactggaagagcactgttcgaacaatcctaactactaaccgactaagttggaggctcatcgttcctattcaggcagatgttatcgaggtccgacnnnnnnaaaaacgactaccaaaaaccgaatccgatcggatacgcatgaggct

SEQ ID NO: 5038 - DNA, 146 bp, Artificial Sequence
  Bisulfite Padlock Probe
  misc_feature 96, 97, 98, 99, 100, 101: n = A,T,C or G
gactggaagagcactgttcgaacaccctaactctcaaaaacccccaagttggaggctcatcgttcctattcaggcagatgttatcgaggtccgacnnnnnnaacccgaccacaaacactccctctcgatcggatacgcatgaggct

SEQ ID NO: 5039 - DNA, 146 bp, Artificial Sequence
  Bisulfite Padlock Probe
  misc_feature 94, 95, 96, 97, 98, 99: n = A,T,C or G
gactggaagagcactgttcgaaccccgaataaactcgtccaaaccgttggaggctcatcgttcctattcaggcagatgttatcgaggtccgacnnnnnnaatacacgtccacgccgaacatacaaagatcggatacgcatgaggct

SEQ ID NO: 5040 - DNA, 146 bp, Artificial Sequence
  Bisulfite Padlock Probe
  misc_feature 94, 95, 96, 97, 98, 99: n = A,T,C or G
gactggaagagcactgttcgaaccccgaataaactcgtccgaaccgttggaggctcatcgttcctattcaggcagatgttatcgaggtccgacnnnnnnaatacacgtccacgccgaacgtacaaagatcggatacgcatgaggct

SEQ ID NO: 5041 - DNA, 146 bp, Artificial Sequence
  Bisulfite Padlock Probe
  misc_feature 92, 93, 94, 95, 96, 97: n = A,T,C or G
gactggaagagcactgttcgaacgaaaaccgccaaaaatataagttggaggctcatcgttcctattcaggcagatgttatcgaggtccgacnnnnnncaccgacttcgaaaacccactacaatactgatcggatacgcatgaggct

SEQ ID NO: 5042 - DNA, 146 bp, Artificial Sequence
  Bisulfite Padlock Probe
  misc_feature 92, 93, 94, 95, 96, 97: n = A,T,C or G
gactggaagagcactgttcgaacgaaaaccgccgaaaatataagttggaggctcatcgttcctattcaggcagatgttatcgaggtccgacnnnnnncaccgacttcgaaaacccgctacaatactgatcggatacgcatgaggct

SEQ ID NO: 5043 - DNA, 146 bp, Artificial Sequence
  Bisulfite Padlock Probe
  misc_feature 96, 97, 98, 99, 100, 101: n = A,T,C or G
gactggaagagcactgttcgaacgaaaacgaacctaacaacacatacgttggaggctcatcgttcctattcaggcagatgttatcgaggtccgacnnnnnnaatccaaatcactcatcttaaaaccgatcggatacgcatgaggct

SEQ ID NO: 5044 - DNA, 146 bp, Artificial Sequence
  Bisulfite Padlock Probe
  misc_feature 96, 97, 98, 99, 100, 101: n = A,T,C or G
gactggaagagcactgttcgaacgaaaacgaacctaacgacacatacgttggaggctcatcgttcctattcaggcagatgttatcgaggtccgacnnnnnnaatccaaatcgctcatcttaaaaccgatcggatacgcatgaggct

SEQ ID NO: 5045 - DNA, 146 bp, Artificial Sequence
  Bisulfite Padlock Probe
  misc_feature 92, 93, 94, 95, 96, 97: n = A,T,C or G
gactggaagagcactgttcgaacgacaccctccaaaaacaaccgttggaggctcatcgttcctattcaggcagatgttatcgaggtccgacnnnnnnaaaaaccaaatattttctcttaacaaatagatcggatacgcatgaggct

SEQ ID NO: 5046 - DNA, 146 bp, Artificial Sequence
  Bisulfite Padlock Probe
  misc_feature 92, 93, 94, 95, 96, 97: n = A,T,C or G
gactggaagagcactgttcgaacgacgccctccaaaaacaaccgttggaggctcatcgttcctattcaggcagatgttatcgaggtccgacnnnnnnaaaaaccaaatattttctcttaacgaatagatcggatacgcatgaggct

SEQ ID NO: 5047 - DNA, 146 bp, Artificial Sequence
  Bisulfite Padlock Probe
  misc_feature 93, 94, 95, 96, 97, 98: n = A,T,C or G
gactggaagagcactgttcgaacgtaaaaccccacaataacaaagttggaggctcatcgttcctattcaggcagatgttatcgaggtccgacnnnnnnaaataaaaaccttaacaaaactaaaaccgatcggatacgcatgaggct

SEQ ID NO: 5048 - DNA, 146 bp, Artificial Sequence
  Bisulfite Padlock Probe
  misc_feature 93, 94, 95, 96, 97, 98: n = A,T,C or G
gactggaagagcactgttcgaacgtaaaaccccgcaataacaaagttggaggctcatcgttcctattcaggcagatgttatcgaggtccgacnnnnnnaaataaaaaccttaacgaaactaaaaccgatcggatacgcatgaggct

SEQ ID NO: 5049 - DNA, 146 bp, Artificial Sequence
  Bisulfite Padlock Probe
  misc_feature 92, 93, 94, 95, 96, 97: n = A,T,C or G
gactggaagagcactgttcgaactacaactaccgccataaaacgttggaggctcatcgttcctattcaggcagatgttatcgaggtccgacnnnnnnaaaaattctcaacgaaacatatataaaacgatcggatacgcatgaggct

SEQ ID NO: 5050 - DNA, 146 bp, Artificial Sequence
  Bisulfite Padlock Probe
  misc_feature 92, 93, 94, 95, 96, 97: n = A,T,C or G
gactggaagagcactgttcgaactacaactaccgccgtaaaacgttggaggctcatcgttcctattcaggcagatgttatcgaggtccgacnnnnnnaaaaattctcaacgaaacgtatataaaacgatcggatacgcatgaggct

SEQ ID NO: 5051 - DNA, 146 bp, Artificial Sequence
  Bisulfite Padlock Probe
  misc_feature 94, 95, 96, 97, 98, 99: n = A,T,C or G
gactggaagagcactgttcgaactacgccacataacaactcccaagttggaggctcatcgttcctattcaggcagatgttatcgaggtccgacnnnnnncgaaaaacgtctccaaaccgcaatctcgatcggatacgcatgaggct

SEQ ID NO: 5052 - DNA, 146 bp, Artificial Sequence
  Bisulfite Padlock Probe
  misc_feature 94, 95, 96, 97, 98, 99: n = A,T,C or G
gactggaagagcactgttcgaactacgccacgtaacaactcccaagttggaggctcatcgttcctattcaggcagatgttatcgaggtccgacnnnnnncgaaaaacgtctccaaaccgcgatctcgatcggatacgcatgaggct

SEQ ID NO: 5053 - DNA, 146 bp, Artificial Sequence
  Bisulfite Padlock Probe
  misc_feature 92, 93, 94, 95, 96, 97: n = A,T,C or G
gactggaagagcactgttcgaactatacctccaccacacccatgttggaggctcatcgttcctattcaggcagatgttatcgaggtccgacnnnnnnttataaaacaaaataatctaatctaaaccgatcggatacgcatgaggct

SEQ ID NO: 5054 - DNA, 146 bp, Artificial Sequence
  Bisulfite Padlock Probe
  misc_feature 92, 93, 94, 95, 96, 97: n = A,T,C or G
gactggaagagcactgttcgaatacaaaaacccaaacacaaaagttggaggctcatcgttcctattcaggcagatgttatcgaggtccgacnnnnnnctataaactatccaaacgtaacttaaaacgatcggatacgcatgaggct

SEQ ID NO: 5055 - DNA, 146 bp, Artificial Sequence
  Bisulfite Padlock Probe
  misc_feature 96, 97, 98, 99, 100, 101: n = A,T,C or G
gactggaagagcactgttcgaatataaaattaccatatttattaattgttggaggctcatcgttcctattcaggcagatgttatcgaggtccgacnnnnnnctccatttcccgcacgataaataaagatcggatacgcatgaggct

SEQ ID NO: 5056 - DNA, 146 bp, Artificial Sequence
  Bisulfite Padlock Probe
  misc_feature 95, 96, 97, 98, 99, 100: n = A,T,C or G
gactggaagagcactgttcgaattttataaaataacttaaacaaaagttggaggctcatcgttcctattcaggcagatgttatcgaggtccgacnnnnnnccaaaaacaaaccaaacctcgatctcgatcggatacgcatgaggct

SEQ ID NO: 5057 - DNA, 146 bp, Artificial Sequence
  Bisulfite Padlock Probe
  misc_feature 93, 94, 95, 96, 97, 98: n = A,T,C or G
gactggaagagcactgttcgacaacccaaatcacttctacataagttggaggctcatcgttcctattcaggcagatgttatcgaggtccgacnnnnnnccaacatttctaaaaccacttacaaaccgatcggatacgcatgaggct

SEQ ID NO: 5058 - DNA, 146 bp, Artificial Sequence
  Bisulfite Padlock Probe
  misc_feature 93, 94, 95, 96, 97, 98: n = A,T,C or G
gactggaagagcactgttcgacaacccgaatcacttctacataagttggaggctcatcgttcctattcaggcagatgttatcgaggtccgacnnnnnnccaacatttctaaaaccacttacaaaccgatcggatacgcatgaggct

SEQ ID NO: 5059 - DNA, 146 bp, Artificial Sequence
  Bisulfite Padlock Probe
  misc_feature 92, 93, 94, 95, 96, 97: n = A,T,C or G
gactggaagagcactgttcgacactaacttaaaacaaaatttagttggaggctcatcgttcctattcaggcagatgttatcgaggtccgacnnnnnnttttacgaaaaatacattactatcaataagatcggatacgcatgaggct

SEQ ID NO: 5060 - DNA, 146 bp, Artificial Sequence
  Bisulfite Padlock Probe
  misc_feature 92, 93, 94, 95, 96, 97: n = A,T,C or G
gactggaagagcactgttcgacactaacttaaaacgaaatttagttggaggctcatcgttcctattcaggcagatgttatcgaggtccgacnnnnnnttttacgaaaaatacgttactatcaataagatcggatacgcatgaggct

SEQ ID NO: 5061 - DNA, 146 bp, Artificial Sequence
  Bisulfite Padlock Probe
  misc_feature 92, 93, 94, 95, 96, 97: n = A,T,C or G
gactggaagagcactgttcgacactactaaacctaattccccagttggaggctcatcgttcctattcaggcagatgttatcgaggtccgacnnnnnnaattataaaaacaataataacaaaaccaagatcggatacgcatgaggct

SEQ ID NO: 5062 - DNA, 146 bp, Artificial Sequence
  Bisulfite Padlock Probe
  misc_feature 92, 93, 94, 95, 96, 97: n = A,T,C or G
gactggaagagcactgttcgacataaactctccccaactttaagttggaggctcatcgttcctattcaggcagatgttatcgaggtccgacnnnnnnccgaaaaacccgatactccgaaacgaaaagatcggatacgcatgaggct

SEQ ID NO: 5063 - DNA, 146 bp, Artificial Sequence
  Bisulfite Padlock Probe
  misc_feature 95, 96, 97, 98, 99, 100: n = A,T,C or G
gactggaagagcactgttcgaccaaacccataatcctactacctccgttggaggctcatcgttcctattcaggcagatgttatcgaggtccgacnnnnnnaaaaatactcgaaaacgcgccgcatcgatcggatacgcatgaggct

SEQ ID NO: 5064 - DNA, 146 bp, Artificial Sequence
  Bisulfite Padlock Probe
  misc_feature 95, 96, 97, 98, 99, 100: n = A,T,C or G
gactggaagagcactgttcgaccaaacccgtaatcctactacctccgttggaggctcatcgttcctattcaggcagatgttatcgaggtccgacnnnnnnaaaaatactcgaaaacgcgccgcgtcgatcggatacgcatgaggct

SEQ ID NO: 5065 - DNA, 146 bp, Artificial Sequence
  Bisulfite Padlock Probe
  misc_feature 92, 93, 94, 95, 96, 97: n = A,T,C or G
gactggaagagcactgttcgaccaaactcacttaccacatttcgttggaggctcatcgttcctattcaggcagatgttatcgaggtccgacnnnnnntaccaaaccacacatttaaaaatctaaccgatcggatacgcatgaggct

SEQ ID NO: 5066 - DNA, 146 bp, Artificial Sequence
  Bisulfite Padlock Probe
  misc_feature 92, 93, 94, 95, 96, 97: n = A,T,C or G
gactggaagagcactgttcgaccaaactcacttaccgcatttcgttggaggctcatcgttcctattcaggcagatgttatcgaggtccgacnnnnnntaccaaaccacacgtttaaaaatctaaccgatcggatacgcatgaggct

SEQ ID NO: 5067 - DNA, 146 bp, Artificial Sequence
  Bisulfite Padlock Probe
  misc_feature 93, 94, 95, 96, 97, 98: n = A,T,C or G
gactggaagagcactgttcgaccaaactctaaaacacataacccgttggaggctcatcgttcctattcaggcagatgttatcgaggtccgacnnnnnnaaaaacccctaaaactaaaactttccttgatcggatacgcatgaggct

SEQ ID NO: 5068 - DNA, 146 bp, Artificial Sequence
  Bisulfite Padlock Probe
  misc_feature 93, 94, 95, 96, 97, 98: n = A,T,C or G
gactggaagagcactgttcgaccaaactctaaaacacgtaacccgttggaggctcatcgttcctattcaggcagatgttatcgaggtccgacnnnnnnaaaaacccctaaaactaaaactttccttgatcggatacgcatgaggct

SEQ ID NO: 5069 - DNA, 146 bp, Artificial Sequence
  Bisulfite Padlock Probe
  misc_feature 92, 93, 94, 95, 96, 97: n = A,T,C or G
gactggaagagcactgttcgaccacctaactctcttacaccccgttggaggctcatcgttcctattcaggcagatgttatcgaggtccgacnnnnnnccctccctaatctaaaatcccgatacaaagatcggatacgcatgaggct

SEQ ID NO: 5070 - DNA, 146 bp, Artificial Sequence
  Bisulfite Padlock Probe
  misc_feature 92, 93, 94, 95, 96, 97: n = A,T,C or G
gactggaagagcactgttcgaccccactcacccaaaactaaaagttggaggctcatcgttcctattcaggcagatgttatcgaggtccgacnnnnnnaaaaacataacaatcacaacctaccattagatcggatacgcatgaggct

SEQ ID NO: 5071 - DNA, 146 bp, Artificial Sequence
  Bisulfite Padlock Probe
  misc_feature 92, 93, 94, 95, 96, 97: n = A,T,C or G
gactggaagagcactgttcgaccccactcacccgaaactaaaagttggaggctcatcgttcctattcaggcagatgttatcgaggtccgacnnnnnnaaaaacataacaatcacaacctaccattagatcggatacgcatgaggct

SEQ ID NO: 5072 - DNA, 146 bp, Artificial Sequence
  Bisulfite Padlock Probe
  misc_feature 95, 96, 97, 98, 99, 100: n = A,T,C or G
gactggaagagcactgttcgaccccgaaatcttttatctacaactagttggaggctcatcgttcctattcaggcagatgttatcgaggtccgacnnnnnntaaaaccgaaaccgaaaactaccaccgatcggatacgcatgaggct

SEQ ID NO: 5073 - DNA, 146 bp, Artificial Sequence
  Bisulfite Padlock Probe
  misc_feature 95, 96, 97, 98, 99, 100: n = A,T,C or G
gactggaagagcactgttcgaccccgaaatcttttatctacgactagttggaggctcatcgttcctattcaggcagatgttatcgaggtccgacnnnnnntaaaaccgaaaccgaaaactaccgccgatcggatacgcatgaggct

SEQ ID NO: 5074 - DNA, 146 bp, Artificial Sequence
  Bisulfite Padlock Probe
  misc_feature 92, 93, 94, 95, 96, 97: n = A,T,C or G
gactggaagagcactgttcgacccgaaccgaaaaccaaaaaacgttggaggctcatcgttcctattcaggcagatgttatcgaggtccgacnnnnnnctaactacaaaaactacaaccctcccatcgatcggatacgcatgaggct

SEQ ID NO: 5075 - DNA, 146 bp, Artificial Sequence
  Bisulfite Padlock Probe
  misc_feature 92, 93, 94, 95, 96, 97: n = A,T,C or G
gactggaagagcactgttcgacccgaaccgaaaaccgaaaaacgttggaggctcatcgttcctattcaggcagatgttatcgaggtccgacnnnnnnctaactacaaaaactacgaccctcccatcgatcggatacgcatgaggct

SEQ ID NO: 5076 - DNA, 146 bp, Artificial Sequence
  Bisulfite Padlock Probe
  misc_feature 92, 93, 94, 95, 96, 97: n = A,T,C or G
gactggaagagcactgttcgaccctacccaaaaacacccttacgttggaggctcatcgttcctattcaggcagatgttatcgaggtccgacnnnnnnataccaataaaattatccaaccccaacaagatcggatacgcatgaggct

SEQ ID NO: 5077 - DNA, 146 bp, Artificial Sequence
  Bisulfite Padlock Probe
  misc_feature 92, 93, 94, 95, 96, 97: n = A,T,C or G
gactggaagagcactgttcgaccctacccaaaaacgcccttacgttggaggctcatcgttcctattcaggcagatgttatcgaggtccgacnnnnnnataccaataaaattatccaaccccaacaagatcggatacgcatgaggct

SEQ ID NO: 5078 - DNA, 146 bp, Artificial Sequence
  Bisulfite Padlock Probe
  misc_feature 93, 94, 95, 96, 97, 98: n = A,T,C or G
gactggaagagcactgttcgaccctcccaaattaaaataaacccgttggaggctcatcgttcctattcaggcagatgttatcgaggtccgacnnnnnncttttccttaacattccacatccctaccgatcggatacgcatgaggct

SEQ ID NO: 5079 - DNA, 146 bp, Artificial Sequence
  Bisulfite Padlock Probe
  misc_feature 93, 94, 95, 96, 97, 98: n = A,T,C or G
gactggaagagcactgttcgaccctcccgaattaaaataaacccgttggaggctcatcgttcctattcaggcagatgttatcgaggtccgacnnnnnncttttccttaacattccgcatccctaccgatcggatacgcatgaggct

SEQ ID NO: 5080 - DNA, 146 bp, Artificial Sequence
  Bisulfite Padlock Probe
  misc_feature 92, 93, 94, 95, 96, 97: n = A,T,C or G
gactggaagagcactgttcgaccgacgtcaatattaaataaccgttggaggctcatcgttcctattcaggcagatgttatcgaggtccgacnnnnnnccacttccgcttcccgtacaaaaaataacgatcggatacgcatgaggct

SEQ ID NO: 5081 - DNA, 146 bp, Artificial Sequence
  Bisulfite Padlock Probe
  misc_feature 92, 93, 94, 95, 96, 97: n = A,T,C or G
gactggaagagcactgttcgaccgacgtcgatattaaataaccgttggaggctcatcgttcctattcaggcagatgttatcgaggtccgacnnnnnnccacttccgcttcccgtacgaaaaataacgatcggatacgcatgaggct

SEQ ID NO: 5082 - DNA, 146 bp, Artificial Sequence
  Bisulfite Padlock Probe
  misc_feature 92, 93, 94, 95, 96, 97: n = A,T,C or G
gactggaagagcactgttcgaccgcctaactctcttacaccccgttggaggctcatcgttcctattcaggcagatgttatcgaggtccgacnnnnnnccctccctaatctaaaatcccgatacgaagatcggatacgcatgaggct

SEQ ID NO: 5083 - DNA, 146 bp, Artificial Sequence
  Bisulfite Padlock Probe
  misc_feature 94, 95, 96, 97, 98, 99: n = A,T,C or G
gactggaagagcactgttcgaccgcctacgaacgcacatatattcgttggaggctcatcgttcctattcaggcagatgttatcgaggtccgacnnnnnntttccgaacgaacgaaaacgcaacaacgatcggatacgcatgaggct

SEQ ID NO: 5084 - DNA, 146 bp, Artificial Sequence
  Bisulfite Padlock Probe
  misc_feature 94, 95, 96, 97, 98, 99: n = A,T,C or G
gactggaagagcactgttcgaccgcctacgaacgcacgtatattcgttggaggctcatcgttcctattcaggcagatgttatcgaggtccgacnnnnnntttccgaacgaacgaaaacgcaacgacgatcggatacgcatgaggct

SEQ ID NO: 5085 - DNA, 146 bp, Artificial Sequence
  Bisulfite Padlock Probe
  misc_feature 93, 94, 95, 96, 97, 98: n = A,T,C or G
gactggaagagcactgttcgacctccaataaatccccaaaacccgttggaggctcatcgttcctattcaggcagatgttatcgaggtccgacnnnnnnttctccaactcgaaacgcgtaaaaactagatcggatacgcatgaggct

SEQ ID NO: 5086 - DNA, 146 bp, Artificial Sequence
  Bisulfite Padlock Probe
  misc_feature 92, 93, 94, 95, 96, 97: n = A,T,C or G
gactggaagagcactgttcgacctccatctaaaaatactaaacgttggaggctcatcgttcctattcaggcagatgttatcgaggtccgacnnnnnnaaaattactatacttatcaatcaaatttcgatcggatacgcatgaggct

SEQ ID NO: 5087 - DNA, 146 bp, Artificial Sequence
  Bisulfite Padlock Probe
  misc_feature 92, 93, 94, 95, 96, 97: n = A,T,C or G
gactggaagagcactgttcgacctcctttaaccgcaaactcaagttggaggctcatcgttcctattcaggcagatgttatcgaggtccgacnnnnnnaaaaatccccaacgtatataccaaacaaagatcggatacgcatgaggct

SEQ ID NO: 5088 - DNA, 146 bp, Artificial Sequence
  Bisulfite Padlock Probe
  misc_feature 92, 93, 94, 95, 96, 97: n = A,T,C or G
gactggaagagcactgttcgacctcctttaaccgcgaactcaagttggaggctcatcgttcctattcaggcagatgttatcgaggtccgacnnnnnnaaaaatccccaacgtatataccaaacgaagatcggatacgcatgaggct

SEQ ID NO: 5089 - DNA, 146 bp, Artificial Sequence
  Bisulfite Padlock Probe
  misc_feature 92, 93, 94, 95, 96, 97: n = A,T,C or G
gactggaagagcactgttcgacgacgcgaaacaatcaatatccgttggaggctcatcgttcctattcaggcagatgttatcgaggtccgacnnnnnnaaaacaacataatttcttaaactaactatgatcggatacgcatgaggct

SEQ ID NO: 5090 - DNA, 146 bp, Artificial Sequence
  Bisulfite Padlock Probe
  misc_feature 92, 93, 94, 95, 96, 97: n = A,T,C or G
gactggaagagcactgttcgacgacgcgaaacgatcaatatccgttggaggctcatcgttcctattcaggcagatgttatcgaggtccgacnnnnnnaaaacgacataatttcttaaactaactatgatcggatacgcatgaggct

SEQ ID NO: 5091 - DNA, 146 bp, Artificial Sequence
  Bisulfite Padlock Probe
  misc_feature 92, 93, 94, 95, 96, 97: n = A,T,C or G
gactggaagagcactgttcgacgcaaaacgcgaaccataaaaagttggaggctcatcgttcctattcaggcagatgttatcgaggtccgacnnnnnnctccctaaaaacaccaaaacaaatctactgatcggatacgcatgaggct

SEQ ID NO: 5092 - DNA, 146 bp, Artificial Sequence
  Bisulfite Padlock Probe
  misc_feature 92, 93, 94, 95, 96, 97: n = A,T,C or G
gactggaagagcactgttcgacgcaaaacgcgaaccgtaaaaagttggaggctcatcgttcctattcaggcagatgttatcgaggtccgacnnnnnnctccctaaaaacgccaaaacaaatctactgatcggatacgcatgaggct

SEQ ID NO: 5093 - DNA, 146 bp, Artificial Sequence
  Bisulfite Padlock Probe
  misc_feature 94, 95, 96, 97, 98, 99: n = A,T,C or G
gactggaagagcactgttcgacgcgatactacactaaaataaaaagttggaggctcatcgttcctattcaggcagatgttatcgaggtccgacnnnnnnaatacaaaataacgaacccgacgacacgatcggatacgcatgaggct

SEQ ID NO: 5094 - DNA, 146 bp, Artificial Sequence
  Bisulfite Padlock Probe
  misc_feature 94, 95, 96, 97, 98, 99: n = A,T,C or G
gactggaagagcactgttcgacgcgatactacgctaaaataaaaagttggaggctcatcgttcctattcaggcagatgttatcgaggtccgacnnnnnnaatacaaaataacgaacccgacgacgcgatcggatacgcatgaggct

SEQ ID NO: 5095 - DNA, 146 bp, Artificial Sequence
  Bisulfite Padlock Probe
  misc_feature 92, 93, 94, 95, 96, 97: n = A,T,C or G
gactggaagagcactgttcgacgctactaaacctaattccccagttggaggctcatcgttcctattcaggcagatgttatcgaggtccgacnnnnnnaattataaaaacaataataacaaaaccaagatcggatacgcatgaggct

SEQ ID NO: 5096 - DNA, 146 bp, Artificial Sequence
  Bisulfite Padlock Probe
  misc_feature 92, 93, 94, 95, 96, 97: n = A,T,C or G
gactggaagagcactgttcgacgtaacccttcctacataaaaagttggaggctcatcgttcctattcaggcagatgttatcgaggtccgacnnnnnnaactaacgcgcgacgaaaccaaaaactatgatcggatacgcatgaggct

SEQ ID NO: 5097 - DNA, 146 bp, Artificial Sequence
  Bisulfite Padlock Probe
  misc_feature 92, 93, 94, 95, 96, 97: n = A,T,C or G
gactggaagagcactgttcgacgtaacccttcctacgtaaaaagttggaggctcatcgttcctattcaggcagatgttatcgaggtccgacnnnnnnaactaacgcgcgacgaaaccgaaaactatgatcggatacgcatgaggct

SEQ ID NO: 5098 - DNA, 146 bp, Artificial Sequence
  Bisulfite Padlock Probe
  misc_feature 92, 93, 94, 95, 96, 97: n = A,T,C or G
gactggaagagcactgttcgactaaaccaccgcacacaaaactgttggaggctcatcgttcctattcaggcagatgttatcgaggtccgacnnnnnncactaaataaactctacaaacaacaaatagatcggatacgcatgaggct

SEQ ID NO: 5099 - DNA, 146 bp, Artificial Sequence
  Bisulfite Padlock Probe
  misc_feature 92, 93, 94, 95, 96, 97: n = A,T,C or G
gactggaagagcactgttcgactaaaccaccgcacgcaaaactgttggaggctcatcgttcctattcaggcagatgttatcgaggtccgacnnnnnncactaaataaactctacaaacgacaaatagatcggatacgcatgaggct

SEQ ID NO: 5100 - DNA, 146 bp, Artificial Sequence
  Bisulfite Padlock Probe
  misc_feature 96, 97, 98, 99, 100, 101: n = A,T,C or G
gactggaagagcactgttcgactaaacctcactcactcaccatacccgttggaggctcatcgttcctattcaggcagatgttatcgaggtccgacnnnnnnaccctacgcgcctaaaaccgaaaacgatcggatacgcatgaggct

SEQ ID NO: 5101 - DNA, 146 bp, Artificial Sequence
  Bisulfite Padlock Probe
  misc_feature 92, 93, 94, 95, 96, 97: n = A,T,C or G
gactggaagagcactgttcgacttcgcctcgaaatccaaaaaagttggaggctcatcgttcctattcaggcagatgttatcgaggtccgacnnnnnnaaaaactcgaaacgacacctaaaacaaaagatcggatacgcatgaggct

SEQ ID NO: 5102 - DNA, 146 bp, Artificial Sequence
  Bisulfite Padlock Probe
  misc_feature 92, 93, 94, 95, 96, 97: n = A,T,C or G
gactggaagagcactgttcgacttcgcctcgaaatccgaaaaagttggaggctcatcgttcctattcaggcagatgttatcgaggtccgacnnnnnnaaaaactcgaaacgacgcctaaaacaaaagatcggatacgcatgaggct

SEQ ID NO: 5103 - DNA, 146 bp, Artificial Sequence
  Bisulfite Padlock Probe
  misc_feature 92, 93, 94, 95, 96, 97: n = A,T,C or G
gactggaagagcactgttcgactttatctaacccaaaacccccgttggaggctcatcgttcctattcaggcagatgttatcgaggtccgacnnnnnnccgcaaatcaatacctctaacctatatctgatcggatacgcatgaggct

SEQ ID NO: 5104 - DNA, 146 bp, Artificial Sequence
  Bisulfite Padlock Probe
  misc_feature 92, 93, 94, 95, 96, 97: n = A,T,C or G
gactggaagagcactgttcgactttatctaacccgaaacccccgttggaggctcatcgttcctattcaggcagatgttatcgaggtccgacnnnnnnccgcgaatcaatacctctaacctatatctgatcggatacgcatgaggct

SEQ ID NO: 5105 - DNA, 146 bp, Artificial Sequence
  Bisulfite Padlock Probe
  misc_feature 95, 96, 97, 98, 99, 100: n = A,T,C or G
gactggaagagcactgttcgataaaaactaaacgcgcacaactaccgttggaggctcatcgttcctattcaggcagatgttatcgaggtccgacnnnnnncatcccgcacctttccaaatcttctcgatcggatacgcatgaggct

SEQ ID NO: 5106 - DNA, 146 bp, Artificial Sequence
  Bisulfite Padlock Probe
  misc_feature 95, 96, 97, 98, 99, 100: n = A,T,C or G
gactggaagagcactgttcgataaaaactaaacgcgcacgactaccgttggaggctcatcgttcctattcaggcagatgttatcgaggtccgacnnnnnncatcccgcgcctttccaaatcttctcgatcggatacgcatgaggct

SEQ ID NO: 5107 - DNA, 146 bp, Artificial Sequence
  Bisulfite Padlock Probe
  misc_feature 92, 93, 94, 95, 96, 97: n = A,T,C or G
gactggaagagcactgttcgataaaacgacccaacccatcaaagttggaggctcatcgttcctattcaggcagatgttatcgaggtccgacnnnnnncctaaccataaaatacatcaacttcctaagatcggatacgcatgaggct

SEQ ID NO: 5108 - DNA, 146 bp, Artificial Sequence
  Bisulfite Padlock Probe
  misc_feature 92, 93, 94, 95, 96, 97: n = A,T,C or G
gactggaagagcactgttcgataaaacgacccgacccatcaaagttggaggctcatcgttcctattcaggcagatgttatcgaggtccgacnnnnnncctaaccataaaatacatcgacttcctaagatcggatacgcatgaggct

SEQ ID NO: 5109 - DNA, 146 bp, Artificial Sequence
  Bisulfite Padlock Probe
  misc_feature 93, 94, 95, 96, 97, 98: n = A,T,C or G
gactggaagagcactgttcgataaaactttataaaaatacaaacgttggaggctcatcgttcctattcaggcagatgttatcgaggtccgacnnnnnnccaacaaaactaaaccccctactctctcgatcggatacgcatgaggct

SEQ ID NO: 5110 - DNA, 146 bp, Artificial Sequence
  Bisulfite Padlock Probe
  misc_feature 92, 93, 94, 95, 96, 97: n = A,T,C or G
gactggaagagcactgttcgatacaaataaaaacacacaaaaagttggaggctcatcgttcctattcaggcagatgttatcgaggtccgacnnnnnnaaaatctacaaacacgaaatttccataccgatcggatacgcatgaggct

SEQ ID NO: 5111 - DNA, 146 bp, Artificial Sequence
  Bisulfite Padlock Probe
  misc_feature 92, 93, 94, 95, 96, 97: n = A,T,C or G
gactggaagagcactgttcgatacaaataaaaacgcacaaaaagttggaggctcatcgttcctattcaggcagatgttatcgaggtccgacnnnnnnaaaatctacaaacacgaaatttccgtaccgatcggatacgcatgaggct

SEQ ID NO: 5112 - DNA, 146 bp, Artificial Sequence
  Bisulfite Padlock Probe
  misc_feature 94, 95, 96, 97, 98, 99: n = A,T,C or G
gactggaagagcactgttcgatacccgaacaacactccaaccaatgttggaggctcatcgttcctattcaggcagatgttatcgaggtccgacnnnnnnctacccccacaaccgcgacaaaataaagatcggatacgcatgaggct

SEQ ID NO: 5113 - DNA, 146 bp, Artificial Sequence
  Bisulfite Padlock Probe
  misc_feature 94, 95, 96, 97, 98, 99: n = A,T,C or G
gactggaagagcactgttcgatacccgaacgacactccaaccaatgttggaggctcatcgttcctattcaggcagatgttatcgaggtccgacnnnnnnctacccccacaaccgcgacgaaataaagatcggatacgcatgaggct

SEQ ID NO: 5114 - DNA, 146 bp, Artificial Sequence
  Bisulfite Padlock Probe
  misc_feature 96, 97, 98, 99, 100, 101: n = A,T,C or G
gactggaagagcactgttcgatacctaaaacgcgcgataaaaacaccgttggaggctcatcgttcctattcaggcagatgttatcgaggtccgacnnnnnnctaaatctccccgcgacgaaccaacgatcggatacgcatgaggct

SEQ ID NO: 5115 - DNA, 146 bp, Artificial Sequence
  Bisulfite Padlock Probe
  misc_feature 96, 97, 98, 99, 100, 101: n = A,T,C or G
gactggaagagcactgttcgatacctaaaacgcgcgataaaaacgccgttggaggctcatcgttcctattcaggcagatgttatcgaggtccgacnnnnnnctaaatctccccgcgacgaaccgacgatcggatacgcatgaggct

SEQ ID NO: 5116 - DNA, 146 bp, Artificial Sequence
  Bisulfite Padlock Probe
  misc_feature 96, 97, 98, 99, 100, 101: n = A,T,C or G
gactggaagagcactgttcgatactcaacgcaccaaataaaacaaccgttggaggctcatcgttcctattcaggcagatgttatcgaggtccgacnnnnnncaaaccctctaactccccactctccgatcggatacgcatgaggct

SEQ ID NO: 5117 - DNA, 146 bp, Artificial Sequence
  Bisulfite Padlock Probe
  misc_feature 96, 97, 98, 99, 100, 101: n = A,T,C or G
gactggaagagcactgttcgatactcaacgcgccaaataaaacaaccgttggaggctcatcgttcctattcaggcagatgttatcgaggtccgacnnnnnncaaaccctctaactccccgctctccgatcggatacgcatgaggct

SEQ ID NO: 5118 - DNA, 146 bp, Artificial Sequence
  Bisulfite Padlock Probe
  misc_feature 92, 93, 94, 95, 96, 97: n = A,T,C or G
gactggaagagcactgttcgatatcctcccgacgccaaaacaagttggaggctcatcgttcctattcaggcagatgttatcgaggtccgacnnnnnncgcgcacaacctaaataccactaccaaatgatcggatacgcatgaggct

SEQ ID NO: 5119 - DNA, 146 bp, Artificial Sequence
  Bisulfite Padlock Probe
  misc_feature 92, 93, 94, 95, 96, 97: n = A,T,C or G
gactggaagagcactgttcgatatcctcccgacgccgaaacaagttggaggctcatcgttcctattcaggcagatgttatcgaggtccgacnnnnnncgcgcacaacctaaataccactaccgaatgatcggatacgcatgaggct

SEQ ID NO: 5120 - DNA, 146 bp, Artificial Sequence
  Bisulfite Padlock Probe
  misc_feature 94, 95, 96, 97, 98, 99: n = A,T,C or G
gactggaagagcactgttcgatctatatcatcctccaaaaataccgttggaggctcatcgttcctattcaggcagatgttatcgaggtccgacnnnnnnaatactaaacgcccgactacaaaaaacgatcggatacgcatgaggct

SEQ ID NO: 5121 - DNA, 146 bp, Artificial Sequence
  Bisulfite Padlock Probe
  misc_feature 94, 95, 96, 97, 98, 99: n = A,T,C or G
gactggaagagcactgttcgatctatatcatcctccgaaaataccgttggaggctcatcgttcctattcaggcagatgttatcgaggtccgacnnnnnnaatactaaacgcccgactacgaaaaacgatcggatacgcatgaggct

SEQ ID NO: 5122 - DNA, 146 bp, Artificial Sequence
  Bisulfite Padlock Probe
  misc_feature 92, 93, 94, 95, 96, 97: n = A,T,C or G
gactggaagagcactgttcgattacctctcgatatcaacccccgttggaggctcatcgttcctattcaggcagatgttatcgaggtccgacnnnnnncctctatcactctctttccaaaccaaaacgatcggatacgcatgaggct

SEQ ID NO: 5123 - DNA, 146 bp, Artificial Sequence
  Bisulfite Padlock Probe
  misc_feature 92, 93, 94, 95, 96, 97: n = A,T,C or G
gactggaagagcactgttcgattacctctcgatatcgacccccgttggaggctcatcgttcctattcaggcagatgttatcgaggtccgacnnnnnncctctatcactctctttccgaaccaaaacgatcggatacgcatgaggct

SEQ ID NO: 5124 - DNA, 146 bp, Artificial Sequence
  Bisulfite Padlock Probe
  misc_feature 92, 93, 94, 95, 96, 97: n = A,T,C or G
gactggaagagcactgttcgattactccccgccacccatatacgttggaggctcatcgttcctattcaggcagatgttatcgaggtccgacnnnnnnaatcccttttactaccaataaactcaaaagatcggatacgcatgaggct

SEQ ID NO: 5125 - DNA, 146 bp, Artificial Sequence
  Bisulfite Padlock Probe
  misc_feature 92, 93, 94, 95, 96, 97: n = A,T,C or G
gactggaagagcactgttcgattactccccgccgcccatatacgttggaggctcatcgttcctattcaggcagatgttatcgaggtccgacnnnnnnaatcccttttactaccaataaactcaaaagatcggatacgcatgaggct

SEQ ID NO: 5126 - DNA, 146 bp, Artificial Sequence
  Bisulfite Padlock Probe
  misc_feature 94, 95, 96, 97, 98, 99: n = A,T,C or G
gactggaagagcactgttcgattcctcctcctcctcttcctcatcgttggaggctcatcgttcctattcaggcagatgttatcgaggtccgacnnnnnncgacctaaaacccccgaccacaaaaaagatcggatacgcatgaggct

SEQ ID NO: 5127 - DNA, 146 bp, Artificial Sequence
  Bisulfite Padlock Probe
  misc_feature 94, 95, 96, 97, 98, 99: n = A,T,C or G
gactggaagagcactgttcgattcctcctcctcctcttcctcgtcgttggaggctcatcgttcctattcaggcagatgttatcgaggtccgacnnnnnncgacctaaaacccccgaccacgaaaaagatcggatacgcatgaggct

SEQ ID NO: 5128 - DNA, 146 bp, Artificial Sequence
  Bisulfite Padlock Probe
  misc_feature 93, 94, 95, 96, 97, 98: n = A,T,C or G
gactggaagagcactgttcgcaaaatctaaaaatactaaaaaccgttggaggctcatcgttcctattcaggcagatgttatcgaggtccgacnnnnnnaaaaacaaaaccacaaaacccaaatcacgatcggatacgcatgaggct

SEQ ID NO: 5129 - DNA, 146 bp, Artificial Sequence
  Bisulfite Padlock Probe
  misc_feature 96, 97, 98, 99, 100, 101: n = A,T,C or G
gactggaagagcactgttcgcaaatcaccaaaacgcactaaatacacgttggaggctcatcgttcctattcaggcagatgttatcgaggtccgacnnnnnncgaactcctaactcgaatcatccccgatcggatacgcatgaggct

SEQ ID NO: 5130 - DNA, 146 bp, Artificial Sequence
  Bisulfite Padlock Probe
  misc_feature 96, 97, 98, 99, 100, 101: n = A,T,C or G
gactggaagagcactgttcgcaaatcaccaaaacgcgctaaatacacgttggaggctcatcgttcctattcaggcagatgttatcgaggtccgacnnnnnncgaactcctaactcgaatcgtccccgatcggatacgcatgaggct

SEQ ID NO: 5131 - DNA, 146 bp, Artificial Sequence
  Bisulfite Padlock Probe
  misc_feature 95, 96, 97, 98, 99, 100: n = A,T,C or G
gactggaagagcactgttcgcaacaacgtataccgccacaaaataagttggaggctcatcgttcctattcaggcagatgttatcgaggtccgacnnnnnnccgaaacgcgttacgacgaaacaaacgatcggatacgcatgaggct

SEQ ID NO: 5132 - DNA, 146 bp, Artificial Sequence
  Bisulfite Padlock Probe
  misc_feature 95, 96, 97, 98, 99, 100: n = A,T,C or G
gactggaagagcactgttcgcaacaacgtataccgccgcaaaataagttggaggctcatcgttcctattcaggcagatgttatcgaggtccgacnnnnnnccgaaacgcgttacgacgaaacgaacgatcggatacgcatgaggct

SEQ ID NO: 5133 - DNA, 146 bp, Artificial Sequence
  Bisulfite Padlock Probe
  misc_feature 94, 95, 96, 97, 98, 99: n = A,T,C or G
gactggaagagcactgttcgcaacactacctacaaaccctaaaaagttggaggctcatcgttcctattcaggcagatgttatcgaggtccgacnnnnnnaatcccgcgacacgtacataacaactcgatcggatacgcatgaggct

SEQ ID NO: 5134 - DNA, 146 bp, Artificial Sequence
  Bisulfite Padlock Probe
  misc_feature 94, 95, 96, 97, 98, 99: n = A,T,C or G
gactggaagagcactgttcgcaacgctacctacaaaccctaaaaagttggaggctcatcgttcctattcaggcagatgttatcgaggtccgacnnnnnnaatcccgcgacacgtacgtaacaactcgatcggatacgcatgaggct

SEQ ID NO: 5135 - DNA, 146 bp, Artificial Sequence
  Bisulfite Padlock Probe
  misc_feature 92, 93, 94, 95, 96, 97: n = A,T,C or G
gactggaagagcactgttcgcacaaaaaccgaaacaacaacccgttggaggctcatcgttcctattcaggcagatgttatcgaggtccgacnnnnnncaccttaaccctactaactccacaaaaccgatcggatacgcatgaggct

SEQ ID NO: 5136 - DNA, 146 bp, Artificial Sequence
  Bisulfite Padlock Probe
  misc_feature 92, 93, 94, 95, 96, 97: n = A,T,C or G
gactggaagagcactgttcgcacaaaaaccgaaacgacaacccgttggaggctcatcgttcctattcaggcagatgttatcgaggtccgacnnnnnncaccttaaccctactaactccgcaaaaccgatcggatacgcatgaggct

SEQ ID NO: 5137 - DNA, 146 bp, Artificial Sequence
  Bisulfite Padlock Probe
  misc_feature 92, 93, 94, 95, 96, 97: n = A,T,C or G
gactggaagagcactgttcgcacacaactactaaaactaaaaagttggaggctcatcgttcctattcaggcagatgttatcgaggtccgacnnnnnntaaaataaaatactaaaacttaataactcgatcggatacgcatgaggct

SEQ ID NO: 5138 - DNA, 146 bp, Artificial Sequence
  Bisulfite Padlock Probe
  misc_feature 92, 93, 94, 95, 96, 97: n = A,T,C or G
gactggaagagcactgttcgcacacccaatccccaaactactcgttggaggctcatcgttcctattcaggcagatgttatcgaggtccgacnnnnnnttttaattcattccttaaacatctaaaccgatcggatacgcatgaggct

SEQ ID NO: 5139 - DNA, 146 bp, Artificial Sequence
  Bisulfite Padlock Probe
  misc_feature 92, 93, 94, 95, 96, 97: n = A,T,C or G
gactggaagagcactgttcgcacacccaatccccgaactactcgttggaggctcatcgttcctattcaggcagatgttatcgaggtccgacnnnnnnttttaattcattccttaaacatctaaaccgatcggatacgcatgaggct

SEQ ID NO: 5140 - DNA, 146 bp, Artificial Sequence
  Bisulfite Padlock Probe
  misc_feature 96, 97, 98, 99, 100, 101: n = A,T,C or G
gactggaagagcactgttcgcacctctcatctctccaactcttacttgttggaggctcatcgttcctattcaggcagatgttatcgaggtccgacnnnnnnaaaaactccgcgaaaacacaaaaaagatcggatacgcatgaggct

SEQ ID NO: 5141 - DNA, 146 bp, Artificial Sequence
  Bisulfite Padlock Probe
  misc_feature 96, 97, 98, 99, 100, 101: n = A,T,C or G
gactggaagagcactgttcgcacctctcatctctccgactcttacttgttggaggctcatcgttcctattcaggcagatgttatcgaggtccgacnnnnnnaaaaactccgcgaaaacacgaaaaagatcggatacgcatgaggct

SEQ ID NO: 5142 - DNA, 146 bp, Artificial Sequence
  Bisulfite Padlock Probe
  misc_feature 94, 95, 96, 97, 98, 99: n = A,T,C or G
gactggaagagcactgttcgcatcctcttactcctactaactttcgttggaggctcatcgttcctattcaggcagatgttatcgaggtccgacnnnnnnacaactccccgacaacgacaataaaaagatcggatacgcatgaggct

SEQ ID NO: 5143 - DNA, 146 bp, Artificial Sequence
  Bisulfite Padlock Probe
  misc_feature 93, 94, 95, 96, 97, 98: n = A,T,C or G
gactggaagagcactgttcgccaaacctccttccccaaaaattcgttggaggctcatcgttcctattcaggcagatgttatcgaggtccgacnnnnnnaactaaaaccctaaaccttaccaatcccgatcggatacgcatgaggct

SEQ ID NO: 5144 - DNA, 146 bp, Artificial Sequence
  Bisulfite Padlock Probe
  misc_feature 92, 93, 94, 95, 96, 97: n = A,T,C or G
gactggaagagcactgttcgccaaacgccgaataaacaaaaaagttggaggctcatcgttcctattcaggcagatgttatcgaggtccgacnnnnnntaaaaatactaaaattcaaataaaaacccgatcggatacgcatgaggct

SEQ ID NO: 5145 - DNA, 146 bp, Artificial Sequence
  Bisulfite Padlock Probe
  misc_feature 92, 93, 94, 95, 96, 97: n = A,T,C or G
gactggaagagcactgttcgccaaacgccgaataaacgaaaaagttggaggctcatcgttcctattcaggcagatgttatcgaggtccgacnnnnnntaaaaatactaaaattcaaataaaaacccgatcggatacgcatgaggct

SEQ ID NO: 5146 - DNA, 146 bp, Artificial Sequence
  Bisulfite Padlock Probe
  misc_feature 92, 93, 94, 95, 96, 97: n = A,T,C or G
gactggaagagcactgttcgccactaccacatctaccatcctcgttggaggctcatcgttcctattcaggcagatgttatcgaggtccgacnnnnnnccacgaaatacgaacaccttaaccaaaccgatcggatacgcatgaggct

SEQ ID NO: 5147 - DNA, 146 bp, Artificial Sequence
  Bisulfite Padlock Probe
  misc_feature 92, 93, 94, 95, 96, 97: n = A,T,C or G
gactggaagagcactgttcgccactaccacgtctaccatcctcgttggaggctcatcgttcctattcaggcagatgttatcgaggtccgacnnnnnnccacgaaatacgaacgccttaaccaaaccgatcggatacgcatgaggct

SEQ ID NO: 5148 - DNA, 146 bp, Artificial Sequence
  Bisulfite Padlock Probe
  misc_feature 94, 95, 96, 97, 98, 99: n = A,T,C or G
gactggaagagcactgttcgcccaaaaaccaaataccaaaaccccgttggaggctcatcgttcctattcaggcagatgttatcgaggtccgacnnnnnnaaaacgccgcctaccaaacactaacaagatcggatacgcatgaggct

SEQ ID NO: 5149 - DNA, 146 bp, Artificial Sequence
  Bisulfite Padlock Probe
  misc_feature 94, 95, 96, 97, 98, 99: n = A,T,C or G
gactggaagagcactgttcgcccaaaaaccgaataccaaaaccccgttggaggctcatcgttcctattcaggcagatgttatcgaggtccgacnnnnnnaaaacgccgcctaccgaacactaacaagatcggatacgcatgaggct

SEQ ID NO: 5150 - DNA, 146 bp, Artificial Sequence
  Bisulfite Padlock Probe
  misc_feature 92, 93, 94, 95, 96, 97: n = A,T,C or G
gactggaagagcactgttcgcccaacaaccacatcttacctctgttggaggctcatcgttcctattcaggcagatgttatcgaggtccgacnnnnnnaatcgtaaatacaactccaacgaaaaaccgatcggatacgcatgaggct

SEQ ID NO: 5151 - DNA, 146 bp, Artificial Sequence
  Bisulfite Padlock Probe
  misc_feature 93, 94, 95, 96, 97, 98: n = A,T,C or G
gactggaagagcactgttcgccccacctccctaaccaaaaattcgttggaggctcatcgttcctattcaggcagatgttatcgaggtccgacnnnnnnaaaaaccataacgaaactaacgaaacaagatcggatacgcatgaggct

SEQ ID NO: 5152 - DNA, 146 bp, Artificial Sequence
  Bisulfite Padlock Probe
  misc_feature 92, 93, 94, 95, 96, 97: n = A,T,C or G
gactggaagagcactgttcgccccattctaacccctaaatactgttggaggctcatcgttcctattcaggcagatgttatcgaggtccgacnnnnnnaaccaaaaacctcgcgaactcctaaaactgatcggatacgcatgaggct

SEQ ID NO: 5153 - DNA, 146 bp, Artificial Sequence
  Bisulfite Padlock Probe
  misc_feature 92, 93, 94, 95, 96, 97: n = A,T,C or G
gactggaagagcactgttcgcccccgaaccctaatccaaaaatgttggaggctcatcgttcctattcaggcagatgttatcgaggtccgacnnnnnnacctacgctcctacaaataactaaaacaagatcggatacgcatgaggct

SEQ ID NO: 5154 - DNA, 146 bp, Artificial Sequence
  Bisulfite Padlock Probe
  misc_feature 92, 93, 94, 95, 96, 97: n = A,T,C or G
gactggaagagcactgttcgcccccgaaccctaatccgaaaatgttggaggctcatcgttcctattcaggcagatgttatcgaggtccgacnnnnnnacctacgctcctacgaataactaaaacaagatcggatacgcatgaggct

SEQ ID NO: 5155 - DNA, 146 bp, Artificial Sequence
  Bisulfite Padlock Probe
  misc_feature 92, 93, 94, 95, 96, 97: n = A,T,C or G
gactggaagagcactgttcgccccgatacataactcctaaaccgttggaggctcatcgttcctattcaggcagatgttatcgaggtccgacnnnnnnaaaaaccgaaaactcccaaacaaaaactagatcggatacgcatgaggct

SEQ ID NO: 5156 - DNA, 146 bp, Artificial Sequence
  Bisulfite Padlock Probe
  misc_feature 92, 93, 94, 95, 96, 97: n = A,T,C or G
gactggaagagcactgttcgccccgatacgtaactcctaaaccgttggaggctcatcgttcctattcaggcagatgttatcgaggtccgacnnnnnnaaaaaccgaaaactcccgaacaaaaactagatcggatacgcatgaggct

SEQ ID NO: 5157 - DNA, 146 bp, Artificial Sequence
  Bisulfite Padlock Probe
  misc_feature 96, 97, 98, 99, 100, 101: n = A,T,C or G
gactggaagagcactgttcgcccgattaccatataaaacaaaaaaccgttggaggctcatcgttcctattcaggcagatgttatcgaggtccgacnnnnnngaactcaaaaacgtccccacctaccgatcggatacgcatgaggct

SEQ ID NO: 5158 - DNA, 146 bp, Artificial Sequence
  Bisulfite Padlock Probe
  misc_feature 96, 97, 98, 99, 100, 101: n = A,T,C or G
gactggaagagcactgttcgcccgattaccatataaaacgaaaaaccgttggaggctcatcgttcctattcaggcagatgttatcgaggtccgacnnnnnngaactcaaaaacgtccccgcctaccgatcggatacgcatgaggct

SEQ ID NO: 5159 - DNA, 146 bp, Artificial Sequence
  Bisulfite Padlock Probe
  misc_feature 92, 93, 94, 95, 96, 97: n = A,T,C or G
gactggaagagcactgttcgccctctactcacccctactactagttggaggctcatcgttcctattcaggcagatgttatcgaggtccgacnnnnnnataatatccctaaacacctccaaccaatagatcggatacgcatgaggct

SEQ ID NO: 5160 - DNA, 146 bp, Artificial Sequence
  Bisulfite Padlock Probe
  misc_feature 92, 93, 94, 95, 96, 97: n = A,T,C or G
gactggaagagcactgttcgccgaaaccgcccacattatataagttggaggctcatcgttcctattcaggcagatgttatcgaggtccgacnnnnnnccccgacaaccaactcctatatataacacgatcggatacgcatgaggct

SEQ ID NO: 5161 - DNA, 146 bp, Artificial Sequence
  Bisulfite Padlock Probe
  misc_feature 92, 93, 94, 95, 96, 97: n = A,T,C or G
gactggaagagcactgttcgccgaaaccgcccgcattatataagttggaggctcatcgttcctattcaggcagatgttatcgaggtccgacnnnnnnccccgacaaccgactcctatatataacacgatcggatacgcatgaggct

SEQ ID NO: 5162 - DNA, 146 bp, Artificial Sequence
  Bisulfite Padlock Probe
  misc_feature 92, 93, 94, 95, 96, 97: n = A,T,C or G
gactggaagagcactgttcgccgaaccaatacaaactcaaaaagttggaggctcatcgttcctattcaggcagatgttatcgaggtccgacnnnnnntactaaaataacctaacttaacaataattgatcggatacgcatgaggct

SEQ ID NO: 5163 - DNA, 146 bp, Artificial Sequence
  Bisulfite Padlock Probe
  misc_feature 92, 93, 94, 95, 96, 97: n = A,T,C or G
gactggaagagcactgttcgccgaaccaatacgaactcaaaaagttggaggctcatcgttcctattcaggcagatgttatcgaggtccgacnnnnnntactaaaataacctaacttaacaataattgatcggatacgcatgaggct

SEQ ID NO: 5164 - DNA, 146 bp, Artificial Sequence
  Bisulfite Padlock Probe
  misc_feature 94, 95, 96, 97, 98, 99: n = A,T,C or G
gactggaagagcactgttcgccgaactaaataaaccgcaaacctagttggaggctcatcgttcctattcaggcagatgttatcgaggtccgacnnnnnnttctaaactcattttatccactaaaaagatcggatacgcatgaggct

SEQ ID NO: 5165 - DNA, 146 bp, Artificial Sequence
  Bisulfite Padlock Probe
  misc_feature 94, 95, 96, 97, 98, 99: n = A,T,C or G
gactggaagagcactgttcgccgaactaaataaaccgcgaacctagttggaggctcatcgttcctattcaggcagatgttatcgaggtccgacnnnnnnttctaaactcattttatccgctaaaaagatcggatacgcatgaggct

SEQ ID NO: 5166 - DNA, 146 bp, Artificial Sequence
  Bisulfite Padlock Probe
  misc_feature 92, 93, 94, 95, 96, 97: n = A,T,C or G
gactggaagagcactgttcgccgacctcctacaaccaaactacgttggaggctcatcgttcctattcaggcagatgttatcgaggtccgacnnnnnnacttctccctcccctctacaatttcataagatcggatacgcatgaggct

SEQ ID NO: 5167 - DNA, 146 bp, Artificial Sequence
  Bisulfite Padlock Probe
  misc_feature 92, 93, 94, 95, 96, 97: n = A,T,C or G
gactggaagagcactgttcgccgacctcctacgaccaaactacgttggaggctcatcgttcctattcaggcagatgttatcgaggtccgacnnnnnnacttctccctcccctctacaatttcgtaagatcggatacgcatgaggct

SEQ ID NO: 5168 - DNA, 146 bp, Artificial Sequence
  Bisulfite Padlock Probe
  misc_feature 94, 95, 96, 97, 98, 99: n = A,T,C or G
gactggaagagcactgttcgccgactataaacaatactccaaatcgttggaggctcatcgttcctattcaggcagatgttatcgaggtccgacnnnnnnacgtactacaactactaaaacaaaaccgatcggatacgcatgaggct

SEQ ID NO: 5169 - DNA, 146 bp, Artificial Sequence
  Bisulfite Padlock Probe
  misc_feature 94, 95, 96, 97, 98, 99: n = A,T,C or G
gactggaagagcactgttcgccgactataaacgatactccaaatcgttggaggctcatcgttcctattcaggcagatgttatcgaggtccgacnnnnnnacgtactacgactactaaaacaaaaccgatcggatacgcatgaggct

SEQ ID NO: 5170 - DNA, 146 bp, Artificial Sequence
  Bisulfite Padlock Probe
  misc_feature 96, 97, 98, 99, 100, 101: n = A,T,C or G
gactggaagagcactgttcgccgcgacccaatatacaaatacaaacagttggaggctcatcgttcctattcaggcagatgttatcgaggtccgacnnnnnncgataaatacacgcgacccctcccagatcggatacgcatgaggct

SEQ ID NO: 5171 - DNA, 146 bp, Artificial Sequence
  Bisulfite Padlock Probe
  misc_feature 96, 97, 98, 99, 100, 101: n = A,T,C or G
gactggaagagcactgttcgccgcgacccaatatacaaatacgaacagttggaggctcatcgttcctattcaggcagatgttatcgaggtccgacnnnnnncgataaatacacgcgacccctcccggatcggatacgcatgaggct

SEQ ID NO: 5172 - DNA, 146 bp, Artificial Sequence
  Bisulfite Padlock Probe
  misc_feature 92, 93, 94, 95, 96, 97: n = A,T,C or G
gactggaagagcactgttcgccgtaaacgaacgacaatccctagttggaggctcatcgttcctattcaggcagatgttatcgaggtccgacnnnnnnaaaaatacgaactccccgaacaaacttccgatcggatacgcatgaggct

SEQ ID NO: 5173 - DNA, 146 bp, Artificial Sequence
  Bisulfite Padlock Probe
  misc_feature 92, 93, 94, 95, 96, 97: n = A,T,C or G
gactggaagagcactgttcgccgtaaacgaacgacgatccctagttggaggctcatcgttcctattcaggcagatgttatcgaggtccgacnnnnnnaaaaatacgaactccccgaacgaacttccgatcggatacgcatgaggct

SEQ ID NO: 5174 - DNA, 146 bp, Artificial Sequence
  Bisulfite Padlock Probe
  misc_feature 94, 95, 96, 97, 98, 99: n = A,T,C or G
gactggaagagcactgttcgcgaaacctaaaaccaccaataaaaagttggaggctcatcgttcctattcaggcagatgttatcgaggtccgacnnnnnnacccgaaaataaaaacgaaacacaaccgatcggatacgcatgaggct

SEQ ID NO: 5175 - DNA, 146 bp, Artificial Sequence
  Bisulfite Padlock Probe
  misc_feature 94, 95, 96, 97, 98, 99: n = A,T,C or G
gactggaagagcactgttcgcgaaacctaaaaccgccaataaaaagttggaggctcatcgttcctattcaggcagatgttatcgaggtccgacnnnnnnacccgaaaataaaaacgaaacgcaaccgatcggatacgcatgaggct

SEQ ID NO: 5176 - DNA, 146 bp, Artificial Sequence
  Bisulfite Padlock Probe
  misc_feature 96, 97, 98, 99, 100, 101: n = A,T,C or G
gactggaagagcactgttcgcgaaatcaacccaccctaacaaaaaacgttggaggctcatcgttcctattcaggcagatgttatcgaggtccgacnnnnnngaaataaacccgaaacgcccacaccgatcggatacgcatgaggct

SEQ ID NO: 5177 - DNA, 146 bp, Artificial Sequence
  Bisulfite Padlock Probe
  misc_feature 96, 97, 98, 99, 100, 101: n = A,T,C or G
gactggaagagcactgttcgcgaaatcaacccaccctaacgaaaaacgttggaggctcatcgttcctattcaggcagatgttatcgaggtccgacnnnnnngaaataaacccgaaacgcccgcaccgatcggatacgcatgaggct

SEQ ID NO: 5178 - DNA, 146 bp, Artificial Sequence
  Bisulfite Padlock Probe
  misc_feature 93, 94, 95, 96, 97, 98: n = A,T,C or G
gactggaagagcactgttcgcgaaatctaaaaatactaaaaaccgttggaggctcatcgttcctattcaggcagatgttatcgaggtccgacnnnnnnaaaaacaaaaccgcaaaacccaaatcacgatcggatacgcatgaggct

SEQ ID NO: 5179 - DNA, 146 bp, Artificial Sequence
  Bisulfite Padlock Probe
  misc_feature 92, 93, 94, 95, 96, 97: n = A,T,C or G
gactggaagagcactgttcgcgaattccaaaactccccaaaaagttggaggctcatcgttcctattcaggcagatgttatcgaggtccgacnnnnnncctttaaaaacacacacatacacaaaaacgatcggatacgcatgaggct

SEQ ID NO: 5180 - DNA, 146 bp, Artificial Sequence
  Bisulfite Padlock Probe
  misc_feature 92, 93, 94, 95, 96, 97: n = A,T,C or G
gactggaagagcactgttcgcgaattccgaaactccccaaaaagttggaggctcatcgttcctattcaggcagatgttatcgaggtccgacnnnnnncctttaaaaacacacacatacacaaaaacgatcggatacgcatgaggct

SEQ ID NO: 5181 - DNA, 146 bp, Artificial Sequence
  Bisulfite Padlock Probe
  misc_feature 94, 95, 96, 97, 98, 99: n = A,T,C or G
gactggaagagcactgttcgcgatataactataaaacaacttcccgttggaggctcatcgttcctattcaggcagatgttatcgaggtccgacnnnnnncccaataattacccttacccgaacaacgatcggatacgcatgaggct

SEQ ID NO: 5182 - DNA, 146 bp, Artificial Sequence
  Bisulfite Padlock Probe
  misc_feature 94, 95, 96, 97, 98, 99: n = A,T,C or G
gactggaagagcactgttcgcgatataactataaaacgacttcccgttggaggctcatcgttcctattcaggcagatgttatcgaggtccgacnnnnnncccaataattacccttacccgaacgacgatcggatacgcatgaggct

SEQ ID NO: 5183 - DNA, 146 bp, Artificial Sequence
  Bisulfite Padlock Probe
  misc_feature 92, 93, 94, 95, 96, 97: n = A,T,C or G
gactggaagagcactgttcgcgcacaactactaaaactaaaaagttggaggctcatcgttcctattcaggcagatgttatcgaggtccgacnnnnnntaaaataaaatactaaaacttaataactcgatcggatacgcatgaggct

SEQ ID NO: 5184 - DNA, 146 bp, Artificial Sequence
  Bisulfite Padlock Probe
  misc_feature 96, 97, 98, 99, 100, 101: n = A,T,C or G
gactggaagagcactgttcgcgccaaaccgacgatcaaaatttaaaagttggaggctcatcgttcctattcaggcagatgttatcgaggtccgacnnnnnncgtcacgccgaacaacaaacaaaacgatcggatacgcatgaggct

SEQ ID NO: 5185 - DNA, 146 bp, Artificial Sequence
  Bisulfite Padlock Probe
  misc_feature 96, 97, 98, 99, 100, 101: n = A,T,C or G
gactggaagagcactgttcgcgccaaaccgacgatcgaaatttaaaagttggaggctcatcgttcctattcaggcagatgttatcgaggtccgacnnnnnncgtcacgccgaacaacgaacaaaacgatcggatacgcatgaggct

SEQ ID NO: 5186 - DNA, 146 bp, Artificial Sequence
  Bisulfite Padlock Probe
  misc_feature 92, 93, 94, 95, 96, 97: n = A,T,C or G
gactggaagagcactgttcgcgcccgtaaataaacgcaaaaaagttggaggctcatcgttcctattcaggcagatgttatcgaggtccgacnnnnnnacacacacaaatctacaattatcccaaaagatcggatacgcatgaggct

SEQ ID NO: 5187 - DNA, 146 bp, Artificial Sequence
  Bisulfite Padlock Probe
  misc_feature 92, 93, 94, 95, 96, 97: n = A,T,C or G
gactggaagagcactgttcgcgcccgtaaataaacgcgaaaaagttggaggctcatcgttcctattcaggcagatgttatcgaggtccgacnnnnnnacacacgcaaatctacaattatcccaaaagatcggatacgcatgaggct

SEQ ID NO: 5188 - DNA, 146 bp, Artificial Sequence
  Bisulfite Padlock Probe
  misc_feature 92, 93, 94, 95, 96, 97: n = A,T,C or G
gactggaagagcactgttcgcgtaaaaacgccgactacaaaaagttggaggctcatcgttcctattcaggcagatgttatcgaggtccgacnnnnnnttaaaacaaactcgaattccaaaactaaagatcggatacgcatgaggct

SEQ ID NO: 5189 - DNA, 146 bp, Artificial Sequence
  Bisulfite Padlock Probe
  misc_feature 92, 93, 94, 95, 96, 97: n = A,T,C or G
gactggaagagcactgttcgcgtaaaaacgccgactacgaaaagttggaggctcatcgttcctattcaggcagatgttatcgaggtccgacnnnnnnttaaaacaaactcgaattccgaaactaaagatcggatacgcatgaggct

SEQ ID NO: 5190 - DNA, 146 bp, Artificial Sequence
  Bisulfite Padlock Probe
  misc_feature 92, 93, 94, 95, 96, 97: n = A,T,C or G
gactggaagagcactgttcgcgtaccaaccctcaactccaaaagttggaggctcatcgttcctattcaggcagatgttatcgaggtccgacnnnnnncttttcctcaccccaaaaactcccaaaaagatcggatacgcatgaggct

SEQ ID NO: 5191 - DNA, 146 bp, Artificial Sequence
  Bisulfite Padlock Probe
  misc_feature 92, 93, 94, 95, 96, 97: n = A,T,C or G
gactggaagagcactgttcgcgtaccgaccctcaactccaaaagttggaggctcatcgttcctattcaggcagatgttatcgaggtccgacnnnnnncttttcctcgccccaaaaactcccaaaaagatcggatacgcatgaggct

SEQ ID NO: 5192 - DNA, 146 bp, Artificial Sequence
  Bisulfite Padlock Probe
  misc_feature 92, 93, 94, 95, 96, 97: n = A,T,C or G
gactggaagagcactgttcgcgtcctcgcaaatctaaataaaagttggaggctcatcgttcctattcaggcagatgttatcgaggtccgacnnnnnnccaaacccaacctctcaccaactaaaaatgatcggatacgcatgaggct

SEQ ID NO: 5193 - DNA, 146 bp, Artificial Sequence
  Bisulfite Padlock Probe
  misc_feature 92, 93, 94, 95, 96, 97: n = A,T,C or G
gactggaagagcactgttcgcgtcctcgcgaatctaaataaaagttggaggctcatcgttcctattcaggcagatgttatcgaggtccgacnnnnnnccaaacccaacctctcgccaactaaaaatgatcggatacgcatgaggct

SEQ ID NO: 5194 - DNA, 146 bp, Artificial Sequence
  Bisulfite Padlock Probe
  misc_feature 94, 95, 96, 97, 98, 99: n = A,T,C or G
gactggaagagcactgttcgcgtcctcttactcctactaactttcgttggaggctcatcgttcctattcaggcagatgttatcgaggtccgacnnnnnnacaactccccgacaacgacgataaaaagatcggatacgcatgaggct

SEQ ID NO: 5195 - DNA, 146 bp, Artificial Sequence
  Bisulfite Padlock Probe
  misc_feature 95, 96, 97, 98, 99, 100: n = A,T,C or G
gactggaagagcactgttcgcgtcttcgtcacaaataaaaataacagttggaggctcatcgttcctattcaggcagatgttatcgaggtccgacnnnnnnccgaccccaataacgacgtacactacgatcggatacgcatgaggct

SEQ ID NO: 5196 - DNA, 146 bp, Artificial Sequence
  Bisulfite Padlock Probe
  misc_feature 95, 96, 97, 98, 99, 100: n = A,T,C or G
gactggaagagcactgttcgcgtcttcgtcacgaataaaaataacagttggaggctcatcgttcctattcaggcagatgttatcgaggtccgacnnnnnnccgaccccaataacgacgtacgctacgatcggatacgcatgaggct

SEQ ID NO: 5197 - DNA, 146 bp, Artificial Sequence
  Bisulfite Padlock Probe
  misc_feature 92, 93, 94, 95, 96, 97: n = A,T,C or G
gactggaagagcactgttcgctaaaactaaaaaccaaaaatacgttggaggctcatcgttcctattcaggcagatgttatcgaggtccgacnnnnnnatactctcctttcatatacaaatcattcagatcggatacgcatgaggct

SEQ ID NO: 5198 - DNA, 146 bp, Artificial Sequence
  Bisulfite Padlock Probe
  misc_feature 92, 93, 94, 95, 96, 97: n = A,T,C or G
gactggaagagcactgttcgctaaaactaaaaaccgaaaatacgttggaggctcatcgttcctattcaggcagatgttatcgaggtccgacnnnnnnatactctcctttcatatacaaatcattcagatcggatacgcatgaggct

SEQ ID NO: 5199 - DNA, 146 bp, Artificial Sequence
  Bisulfite Padlock Probe
  misc_feature 92, 93, 94, 95, 96, 97: n = A,T,C or G
gactggaagagcactgttcgctaaccttaaaccctacttactcgttggaggctcatcgttcctattcaggcagatgttatcgaggtccgacnnnnnntctaatcgaaccaaaaattactaaaaaccgatcggatacgcatgaggct

SEQ ID NO: 5200 - DNA, 146 bp, Artificial Sequence
  Bisulfite Padlock Probe
  misc_feature 93, 94, 95, 96, 97, 98: n = A,T,C or G
gactggaagagcactgttcgctaataaccgacaaaaccaaaaccgttggaggctcatcgttcctattcaggcagatgttatcgaggtccgacnnnnnntccgtctcgcaaactcttcctacaaaaagatcggatacgcatgaggct

SEQ ID NO: 5201 - DNA, 146 bp, Artificial Sequence
  Bisulfite Padlock Probe
  misc_feature 93, 94, 95, 96, 97, 98: n = A,T,C or G
gactggaagagcactgttcgctaataaccgacaaaaccgaaaccgttggaggctcatcgttcctattcaggcagatgttatcgaggtccgacnnnnnntccgtctcgcgaactcttcctacaaaaagatcggatacgcatgaggct

SEQ ID NO: 5202 - DNA, 146 bp, Artificial Sequence
  Bisulfite Padlock Probe
  misc_feature 92, 93, 94, 95, 96, 97: n = A,T,C or G
gactggaagagcactgttcgctacaaccgaaatccaaacctccgttggaggctcatcgttcctattcaggcagatgttatcgaggtccgacnnnnnncaacgaacaacgcgcaaaaaactcaaaaagatcggatacgcatgaggct

SEQ ID NO: 5203 - DNA, 146 bp, Artificial Sequence
  Bisulfite Padlock Probe
  misc_feature 92, 93, 94, 95, 96, 97: n = A,T,C or G
gactggaagagcactgttcgctacaaccgaaatccgaacctccgttggaggctcatcgttcctattcaggcagatgttatcgaggtccgacnnnnnncaacgaacaacgcgcgaaaaactcaaaaagatcggatacgcatgaggct

SEQ ID NO: 5204 - DNA, 146 bp, Artificial Sequence
  Bisulfite Padlock Probe
  misc_feature 92, 93, 94, 95, 96, 97: n = A,T,C or G
gactggaagagcactgttcgctaccaacacccctactcctctagttggaggctcatcgttcctattcaggcagatgttatcgaggtccgacnnnnnnactaaatataaaaacaaaaatccaacatcgatcggatacgcatgaggct

SEQ ID NO: 5205 - DNA, 146 bp, Artificial Sequence
  Bisulfite Padlock Probe
  misc_feature 92, 93, 94, 95, 96, 97: n = A,T,C or G
gactggaagagcactgttcgctaccaacgcccctactcctctagttggaggctcatcgttcctattcaggcagatgttatcgaggtccgacnnnnnnactaaatataaaaacaaaaatccaacatcgatcggatacgcatgaggct

SEQ ID NO: 5206 - DNA, 146 bp, Artificial Sequence
  Bisulfite Padlock Probe
  misc_feature 92, 93, 94, 95, 96, 97: n = A,T,C or G
gactggaagagcactgttcgctcaacgaaaaatccacaaaaaagttggaggctcatcgttcctattcaggcagatgttatcgaggtccgacnnnnnnatactaccctctacgccgcaaaaattaatgatcggatacgcatgaggct

SEQ ID NO: 5207 - DNA, 146 bp, Artificial Sequence
  Bisulfite Padlock Probe
  misc_feature 92, 93, 94, 95, 96, 97: n = A,T,C or G
gactggaagagcactgttcgctcaacgaaaaatccacgaaaaagttggaggctcatcgttcctattcaggcagatgttatcgaggtccgacnnnnnnatactaccctctacgccgcgaaaattaatgatcggatacgcatgaggct

SEQ ID NO: 5208 - DNA, 146 bp, Artificial Sequence
  Bisulfite Padlock Probe
  misc_feature 92, 93, 94, 95, 96, 97: n = A,T,C or G
gactggaagagcactgttcgctcaccaaatccctcaaaataacgttggaggctcatcgttcctattcaggcagatgttatcgaggtccgacnnnnnnctaaacttcaaaaaccctcctatatctccgatcggatacgcatgaggct

SEQ ID NO: 5209 - DNA, 146 bp, Artificial Sequence
  Bisulfite Padlock Probe
  misc_feature 92, 93, 94, 95, 96, 97: n = A,T,C or G
gactggaagagcactgttcgctccaaacaataacgaacaacaagttggaggctcatcgttcctattcaggcagatgttatcgaggtccgacnnnnnnccaaatcctaaacttaaaacaaccttaacgatcggatacgcatgaggct

SEQ ID NO: 5210 - DNA, 146 bp, Artificial Sequence
  Bisulfite Padlock Probe
  misc_feature 92, 93, 94, 95, 96, 97: n = A,T,C or G
gactggaagagcactgttcgctccaaacaataacgaacgacaagttggaggctcatcgttcctattcaggcagatgttatcgaggtccgacnnnnnnccaaatcctaaacttaaaacaaccttaacgatcggatacgcatgaggct

SEQ ID NO: 5211 - DNA, 146 bp, Artificial Sequence
  Bisulfite Padlock Probe
  misc_feature 92, 93, 94, 95, 96, 97: n = A,T,C or G
gactggaagagcactgttcgctccccgaaccaaactctaaaacgttggaggctcatcgttcctattcaggcagatgttatcgaggtccgacnnnnnncgcaaaaacaacccctaaactaacaaattgatcggatacgcatgaggct

SEQ ID NO: 5212 - DNA, 146 bp, Artificial Sequence
  Bisulfite Padlock Probe
  misc_feature 92, 93, 94, 95, 96, 97: n = A,T,C or G
gactggaagagcactgttcgctccccgaaccgaactctaaaacgttggaggctcatcgttcctattcaggcagatgttatcgaggtccgacnnnnnncgcgaaaacaacccctaaactaacaaattgatcggatacgcatgaggct

SEQ ID NO: 5213 - DNA, 146 bp, Artificial Sequence
  Bisulfite Padlock Probe
  misc_feature 92, 93, 94, 95, 96, 97: n = A,T,C or G
gactggaagagcactgttcgctcctcacccttcaaatccctctgttggaggctcatcgttcctattcaggcagatgttatcgaggtccgacnnnnnnaaaaacccaaactcgaaccgaacaataaagatcggatacgcatgaggct

SEQ ID NO: 5214 - DNA, 146 bp, Artificial Sequence
  Bisulfite Padlock Probe
  misc_feature 92, 93, 94, 95, 96, 97: n = A,T,C or G
gactggaagagcactgttcgctcgacgaataataacccaacaagttggaggctcatcgttcctattcaggcagatgttatcgaggtccgacnnnnnntaatttccgtaactcgccccaccattaacgatcggatacgcatgaggct

SEQ ID NO: 5215 - DNA, 146 bp, Artificial Sequence
  Bisulfite Padlock Probe
  misc_feature 92, 93, 94, 95, 96, 97: n = A,T,C or G
gactggaagagcactgttcgctcgacgaataataacccgacaagttggaggctcatcgttcctattcaggcagatgttatcgaggtccgacnnnnnntaatttccgtaactcgccccaccgttaacgatcggatacgcatgaggct

SEQ ID NO: 5216 - DNA, 146 bp, Artificial Sequence
  Bisulfite Padlock Probe
  misc_feature 92, 93, 94, 95, 96, 97: n = A,T,C or G
gactggaagagcactgttcgctcgccaaatccctcaaaataacgttggaggctcatcgttcctattcaggcagatgttatcgaggtccgacnnnnnnctaaacttcaaaaaccctcctatatctccgatcggatacgcatgaggct

SEQ ID NO: 5217 - DNA, 146 bp, Artificial Sequence
  Bisulfite Padlock Probe
  misc_feature 96, 97, 98, 99, 100, 101: n = A,T,C or G
gactggaagagcactgttcgtaaattctaacaacatccactacaaccgttggaggctcatcgttcctattcaggcagatgttatcgaggtccgacnnnnnnaaaaacttactaaaaataacaaaaagatcggatacgcatgaggct

SEQ ID NO: 5218 - DNA, 146 bp, Artificial Sequence
  Bisulfite Padlock Probe
  misc_feature 92, 93, 94, 95, 96, 97: n = A,T,C or G
gactggaagagcactgttcgtaacaaaaaactactaaaaataagttggaggctcatcgttcctattcaggcagatgttatcgaggtccgacnnnnnnaaaaacaaacaaaaacttacttctaaaaagatcggatacgcatgaggct

SEQ ID NO: 5219 - DNA, 146 bp, Artificial Sequence
  Bisulfite Padlock Probe
  misc_feature 92, 93, 94, 95, 96, 97: n = A,T,C or G
gactggaagagcactgttcgtaacaacacaaccgaacaaaaaagttggaggctcatcgttcctattcaggcagatgttatcgaggtccgacnnnnnnttccaactccactacgaacacatcaatacgatcggatacgcatgaggct

SEQ ID NO: 5220 - DNA, 146 bp, Artificial Sequence
  Bisulfite Padlock Probe
  misc_feature 92, 93, 94, 95, 96, 97: n = A,T,C or G
gactggaagagcactgttcgtaacaacacaaccgaacgaaaaagttggaggctcatcgttcctattcaggcagatgttatcgaggtccgacnnnnnnttccaactccactacgaacacgtcaatacgatcggatacgcatgaggct

SEQ ID NO: 5221 - DNA, 146 bp, Artificial Sequence
  Bisulfite Padlock Probe
  misc_feature 92, 93, 94, 95, 96, 97: n = A,T,C or G
gactggaagagcactgttcgtaaccaacatctaaaaacaaaaagttggaggctcatcgttcctattcaggcagatgttatcgaggtccgacnnnnnncgaaacgcaaaacgccgaaaactcaaaaagatcggatacgcatgaggct

SEQ ID NO: 5222 - DNA, 146 bp, Artificial Sequence
  Bisulfite Padlock Probe
  misc_feature 92, 93, 94, 95, 96, 97: n = A,T,C or G
gactggaagagcactgttcgtaacgaaaaactactaaaaataagttggaggctcatcgttcctattcaggcagatgttatcgaggtccgacnnnnnnaaaaacaaacaaaaacttacttctaaaaagatcggatacgcatgaggct

SEQ ID NO: 5223 - DNA, 146 bp, Artificial Sequence
  Bisulfite Padlock Probe
  misc_feature 96, 97, 98, 99, 100, 101: n = A,T,C or G
gactggaagagcactgttcgtataaaatatacaaaaatacgacccacgttggaggctcatcgttcctattcaggcagatgttatcgaggtccgacnnnnnnaaaaccgaacctaccaccctccaaagatcggatacgcatgaggct

SEQ ID NO: 5224 - DNA, 146 bp, Artificial Sequence
  Bisulfite Padlock Probe
  misc_feature 96, 97, 98, 99, 100, 101: n = A,T,C or G
gactggaagagcactgttcgtataaaatatacaaaaatacgacccgcgttggaggctcatcgttcctattcaggcagatgttatcgaggtccgacnnnnnnaaaaccgaacctaccgccctccaaagatcggatacgcatgaggct

SEQ ID NO: 5225 - DNA, 146 bp, Artificial Sequence
  Bisulfite Padlock Probe
  misc_feature 92, 93, 94, 95, 96, 97: n = A,T,C or G
gactggaagagcactgttcgtcacccatcacccctaacctaacgttggaggctcatcgttcctattcaggcagatgttatcgaggtccgacnnnnnnatcaaaatcacttctttccaaaaaccctagatcggatacgcatgaggct

SEQ ID NO: 5226 - DNA, 146 bp, Artificial Sequence
  Bisulfite Padlock Probe
  misc_feature 93, 94, 95, 96, 97, 98: n = A,T,C or G
gactggaagagcactgttcgtcacgtacgccaaaatcctcaaacgttggaggctcatcgttcctattcaggcagatgttatcgaggtccgacnnnnnnaaaaacgccaacgaaatacgaaaccaaagatcggatacgcatgaggct

SEQ ID NO: 5227 - DNA, 146 bp, Artificial Sequence
  Bisulfite Padlock Probe
  misc_feature 93, 94, 95, 96, 97, 98: n = A,T,C or G
gactggaagagcactgttcgtcacgtacgccgaaatcctcaaacgttggaggctcatcgttcctattcaggcagatgttatcgaggtccgacnnnnnnaaaaacgccaacgaaatacgaaaccgaagatcggatacgcatgaggct

SEQ ID NO: 5228 - DNA, 146 bp, Artificial Sequence
  Bisulfite Padlock Probe
  misc_feature 93, 94, 95, 96, 97, 98: n = A,T,C or G
gactggaagagcactgttcgtcatcaaaacctcaaacccaaaaagttggaggctcatcgttcctattcaggcagatgttatcgaggtccgacnnnnnncctttcgaaataacaactataaaccccagatcggatacgcatgaggct

SEQ ID NO: 5229 - DNA, 146 bp, Artificial Sequence
  Bisulfite Padlock Probe
  misc_feature 92, 93, 94, 95, 96, 97: n = A,T,C or G
gactggaagagcactgttcgtccccgaaatacgaaaaacaaatgttggaggctcatcgttcctattcaggcagatgttatcgaggtccgacnnnnnnaaaatctaaaaacttcataaataaactccgatcggatacgcatgaggct

SEQ ID NO: 5230 - DNA, 146 bp, Artificial Sequence
  Bisulfite Padlock Probe
  misc_feature 92, 93, 94, 95, 96, 97: n = A,T,C or G
gactggaagagcactgttcgtccccgaaatacgaaaaacgaatgttggaggctcatcgttcctattcaggcagatgttatcgaggtccgacnnnnnnaaaatctaaaaacttcataaataaactccgatcggatacgcatgaggct

SEQ ID NO: 5231 - DNA, 146 bp, Artificial Sequence
  Bisulfite Padlock Probe
  misc_feature 93, 94, 95, 96, 97, 98: n = A,T,C or G
gactggaagagcactgttcgtccgaaccctcaaaacaaaaatccgttggaggctcatcgttcctattcaggcagatgttatcgaggtccgacnnnnnnaaaacgataataaaacacttcaaacaaagatcggatacgcatgaggct

SEQ ID NO: 5232 - DNA, 146 bp, Artificial Sequence
  Bisulfite Padlock Probe
  misc_feature 93, 94, 95, 96, 97, 98: n = A,T,C or G
gactggaagagcactgttcgtccgaaccctcgaaacaaaaatccgttggaggctcatcgttcctattcaggcagatgttatcgaggtccgacnnnnnnaaaacgataataaaacgcttcaaacaaagatcggatacgcatgaggct

SEQ ID NO: 5233 - DNA, 146 bp, Artificial Sequence
  Bisulfite Padlock Probe
  misc_feature 92, 93, 94, 95, 96, 97: n = A,T,C or G
gactggaagagcactgttcgtccgacctaaacgcaaaacaaccgttggaggctcatcgttcctattcaggcagatgttatcgaggtccgacnnnnnnaaaaacccgaacaaaataaaaaccgcacagatcggatacgcatgaggct

SEQ ID NO: 5234 - DNA, 146 bp, Artificial Sequence
  Bisulfite Padlock Probe
  misc_feature 92, 93, 94, 95, 96, 97: n = A,T,C or G
gactggaagagcactgttcgtccgacctaaacgcgaaacaaccgttggaggctcatcgttcctattcaggcagatgttatcgaggtccgacnnnnnnaaaaacccgaacaaaataaaaaccgcgcagatcggatacgcatgaggct

SEQ ID NO: 5235 - DNA, 146 bp, Artificial Sequence
  Bisulfite Padlock Probe
  misc_feature 92, 93, 94, 95, 96, 97: n = A,T,C or G
gactggaagagcactgttcgtcgaacccctaatctcaaccctcgttggaggctcatcgttcctattcaggcagatgttatcgaggtccgacnnnnnnctcctcacctcatacttcttcatacaactgatcggatacgcatgaggct

SEQ ID NO: 5236 - DNA, 146 bp, Artificial Sequence
  Bisulfite Padlock Probe
  misc_feature 92, 93, 94, 95, 96, 97: n = A,T,C or G
gactggaagagcactgttcgtcgaacccctaatctcgaccctcgttggaggctcatcgttcctattcaggcagatgttatcgaggtccgacnnnnnnctcctcacctcgtacttcttcatacaactgatcggatacgcatgaggct

SEQ ID NO: 5237 - DNA, 146 bp, Artificial Sequence
  Bisulfite Padlock Probe
  misc_feature 93, 94, 95, 96, 97, 98: n = A,T,C or G
gactggaagagcactgttcgtcgacgttaactaaacataaactagttggaggctcatcgttcctattcaggcagatgttatcgaggtccgacnnnnnnaccccaaaaacgaaaataacaataaaaagatcggatacgcatgaggct

SEQ ID NO: 5238 - DNA, 146 bp, Artificial Sequence
  Bisulfite Padlock Probe
  misc_feature 93, 94, 95, 96, 97, 98: n = A,T,C or G
gactggaagagcactgttcgtcgacgttaactaaacgtaaactagttggaggctcatcgttcctattcaggcagatgttatcgaggtccgacnnnnnnaccccaaaaacgaaaataacgataaaaagatcggatacgcatgaggct

SEQ ID NO: 5239 - DNA, 146 bp, Artificial Sequence
  Bisulfite Padlock Probe
  misc_feature 92, 93, 94, 95, 96, 97: n = A,T,C or G
gactggaagagcactgttcgtcgatcctcacaccacctacttcgttggaggctcatcgttcctattcaggcagatgttatcgaggtccgacnnnnnncaccacgaactaatcgccactcaactaaagatcggatacgcatgaggct

SEQ ID NO: 5240 - DNA, 146 bp, Artificial Sequence
  Bisulfite Padlock Probe
  misc_feature 92, 93, 94, 95, 96, 97: n = A,T,C or G
gactggaagagcactgttcgtcgatcctcacaccgcctacttcgttggaggctcatcgttcctattcaggcagatgttatcgaggtccgacnnnnnncaccacgaactaatcgccgctcaactaaagatcggatacgcatgaggct

SEQ ID NO: 5241 - DNA, 146 bp, Artificial Sequence
  Bisulfite Padlock Probe
  misc_feature 92, 93, 94, 95, 96, 97: n = A,T,C or G
gactggaagagcactgttcgtcgctcccgaaatcgacaaaaaagttggaggctcatcgttcctattcaggcagatgttatcgaggtccgacnnnnnntaaccgcgactaccaactctcacctaatcgatcggatacgcatgaggct

SEQ ID NO: 5242 - DNA, 146 bp, Artificial Sequence
  Bisulfite Padlock Probe
  misc_feature 92, 93, 94, 95, 96, 97: n = A,T,C or G
gactggaagagcactgttcgtcgctcccgaaatcgacgaaaaagttggaggctcatcgttcctattcaggcagatgttatcgaggtccgacnnnnnntaaccgcgactaccgactctcacctaatcgatcggatacgcatgaggct

SEQ ID NO: 5243 - DNA, 146 bp, Artificial Sequence
  Bisulfite Padlock Probe
  misc_feature 92, 93, 94, 95, 96, 97: n = A,T,C or G
gactggaagagcactgttcgtctcctaaacgactcccacaaccgttggaggctcatcgttcctattcaggcagatgttatcgaggtccgacnnnnnntatactaaatatacgacgccgaccccaaagatcggatacgcatgaggct

SEQ ID NO: 5244 - DNA, 146 bp, Artificial Sequence
  Bisulfite Padlock Probe
  misc_feature 92, 93, 94, 95, 96, 97: n = A,T,C or G
gactggaagagcactgttcgtctcctaaacgactcccacgaccgttggaggctcatcgttcctattcaggcagatgttatcgaggtccgacnnnnnntatactaaatatacgacgccgaccccgaagatcggatacgcatgaggct

SEQ ID NO: 5245 - DNA, 146 bp, Artificial Sequence
  Bisulfite Padlock Probe
  misc_feature 92, 93, 94, 95, 96, 97: n = A,T,C or G
gactggaagagcactgttcgtcttcttccctaaacttaactacgttggaggctcatcgttcctattcaggcagatgttatcgaggtccgacnnnnnncgaccttaccaccctccctactactaaccgatcggatacgcatgaggct

SEQ ID NO: 5246 - DNA, 146 bp, Artificial Sequence
  Bisulfite Padlock Probe
  misc_feature 95, 96, 97, 98, 99, 100: n = A,T,C or G
gactggaagagcactgttcgttaataaaatcaataaaatttaaaaagttggaggctcatcgttcctattcaggcagatgttatcgaggtccgacnnnnnnctctctacgtaccctaacaaacaaacgatcggatacgcatgaggct

SEQ ID NO: 5247 - DNA, 146 bp, Artificial Sequence
  Bisulfite Padlock Probe
  misc_feature 96, 97, 98, 99, 100, 101: n = A,T,C or G
gactggaagagcactgttcgttcaaatacgacgtcgacaaacaaaacgttggaggctcatcgttcctattcaggcagatgttatcgaggtccgacnnnnnnccaaccgcgtacctaccaaaaaaccgatcggatacgcatgaggct

SEQ ID NO: 5248 - DNA, 146 bp, Artificial Sequence
  Bisulfite Padlock Probe
  misc_feature 96, 97, 98, 99, 100, 101: n = A,T,C or G
gactggaagagcactgttcgttcaaatacgacgtcgacgaacaaaacgttggaggctcatcgttcctattcaggcagatgttatcgaggtccgacnnnnnnccaaccgcgtacctaccgaaaaaccgatcggatacgcatgaggct

SEQ ID NO: 5249 - DNA, 146 bp, Artificial Sequence
  Bisulfite Padlock Probe
  misc_feature 92, 93, 94, 95, 96, 97: n = A,T,C or G
gactggaagagcactgttcgtttcccaaccaaactaacaaattgttggaggctcatcgttcctattcaggcagatgttatcgaggtccgacnnnnnnaccccgtatataacgaacactcctttaccgatcggatacgcatgaggct

SEQ ID NO: 5250 - DNA, 146 bp, Artificial Sequence
  Bisulfite Padlock Probe
  misc_feature 92, 93, 94, 95, 96, 97: n = A,T,C or G
gactggaagagcactgttcgtttcccaaccgaactaacaaattgttggaggctcatcgttcctattcaggcagatgttatcgaggtccgacnnnnnnaccccgtatataacgaacgctcctttaccgatcggatacgcatgaggct

SEQ ID NO: 5251 - DNA, 146 bp, Artificial Sequence
  Bisulfite Padlock Probe
  misc_feature 96, 97, 98, 99, 100, 101: n = A,T,C or G
gactggaagagcactgttcgtttttatctcttccaccctccaaaaaagttggaggctcatcgttcctattcaggcagatgttatcgaggtccgacnnnnnnaaaaacctacgatacgaacgcaaccgatcggatacgcatgaggct

SEQ ID NO: 5252 - DNA, 146 bp, Artificial Sequence
  Bisulfite Padlock Probe
  misc_feature 96, 97, 98, 99, 100, 101: n = A,T,C or G
gactggaagagcactgttcgtttttatctcttccaccctccgaaaaagttggaggctcatcgttcctattcaggcagatgttatcgaggtccgacnnnnnnaaaaacctacgatacgaacgcgaccgatcggatacgcatgaggct

SEQ ID NO: 5253 - DNA, 146 bp, Artificial Sequence
  Bisulfite Padlock Probe
  misc_feature 93, 94, 95, 96, 97, 98: n = A,T,C or G
gactggaagagcactgttctaaaaacacccgacccaccaccatagttggaggctcatcgttcctattcaggcagatgttatcgaggtccgacnnnnnncgaactttatataaataaaaactacaccgatcggatacgcatgaggct

SEQ ID NO: 5254 - DNA, 146 bp, Artificial Sequence
  Bisulfite Padlock Probe
  misc_feature 93, 94, 95, 96, 97, 98: n = A,T,C or G
gactggaagagcactgttctaaaaacacccgacccgccaccatagttggaggctcatcgttcctattcaggcagatgttatcgaggtccgacnnnnnncgaactttatataaataaaaactacgccgatcggatacgcatgaggct

SEQ ID NO: 5255 - DNA, 146 bp, Artificial Sequence
  Bisulfite Padlock Probe
  misc_feature 96, 97, 98, 99, 100, 101: n = A,T,C or G
gactggaagagcactgttctaaaaaccccacaacaatctaaaactacgttggaggctcatcgttcctattcaggcagatgttatcgaggtccgacnnnnnntacaacccgtaaaacaaacccaaccgatcggatacgcatgaggct

SEQ ID NO: 5256 - DNA, 146 bp, Artificial Sequence
  Bisulfite Padlock Probe
  misc_feature 96, 97, 98, 99, 100, 101: n = A,T,C or G
gactggaagagcactgttctaaaaaccccacaacgatctaaaactacgttggaggctcatcgttcctattcaggcagatgttatcgaggtccgacnnnnnntacaacccgtaaaacgaacccaaccgatcggatacgcatgaggct

SEQ ID NO: 5257 - DNA, 146 bp, Artificial Sequence
  Bisulfite Padlock Probe
  misc_feature 95, 96, 97, 98, 99, 100: n = A,T,C or G
gactggaagagcactgttctaaaaacccgcctcgccaaatacctacgttggaggctcatcgttcctattcaggcagatgttatcgaggtccgacnnnnnntattctctatccaaaaccaaaaacacgatcggatacgcatgaggct

SEQ ID NO: 5258 - DNA, 146 bp, Artificial Sequence
  Bisulfite Padlock Probe
  misc_feature 95, 96, 97, 98, 99, 100: n = A,T,C or G
gactggaagagcactgttctaaaaacccgcctcgccgaatacctacgttggaggctcatcgttcctattcaggcagatgttatcgaggtccgacnnnnnntattctctatccaaaaccaaaaacgcgatcggatacgcatgaggct

SEQ ID NO: 5259 - DNA, 146 bp, Artificial Sequence
  Bisulfite Padlock Probe
  misc_feature 93, 94, 95, 96, 97, 98: n = A,T,C or G
gactggaagagcactgttctaaaaacgacgaataatacaaaaaagttggaggctcatcgttcctattcaggcagatgttatcgaggtccgacnnnnnntaaaacaaatacaccgtatcactacccagatcggatacgcatgaggct

SEQ ID NO: 5260 - DNA, 146 bp, Artificial Sequence
  Bisulfite Padlock Probe
  misc_feature 93, 94, 95, 96, 97, 98: n = A,T,C or G
gactggaagagcactgttctaaaaacgacgaataatacgaaaaagttggaggctcatcgttcctattcaggcagatgttatcgaggtccgacnnnnnntaaaacaaatacaccgtatcgctacccagatcggatacgcatgaggct

SEQ ID NO: 5261 - DNA, 146 bp, Artificial Sequence
  Bisulfite Padlock Probe
  misc_feature 93, 94, 95, 96, 97, 98: n = A,T,C or G
gactggaagagcactgttctaaaaactaaaacctcccgccacccgttggaggctcatcgttcctattcaggcagatgttatcgaggtccgacnnnnnnataacctaaacgacgactaataaacaccgatcggatacgcatgaggct

SEQ ID NO: 5262 - DNA, 146 bp, Artificial Sequence
  Bisulfite Padlock Probe
  misc_feature 93, 94, 95, 96, 97, 98: n = A,T,C or G
gactggaagagcactgttctaaaaactaaaacctcccgccgcccgttggaggctcatcgttcctattcaggcagatgttatcgaggtccgacnnnnnnataacctaaacgacgactaataaacgccgatcggatacgcatgaggct

SEQ ID NO: 5263 - DNA, 146 bp, Artificial Sequence
  Bisulfite Padlock Probe
  misc_feature 96, 97, 98, 99, 100, 101: n = A,T,C or G
gactggaagagcactgttctaaaaactcaaatatatttaaaaaccctgttggaggctcatcgttcctattcaggcagatgttatcgaggtccgacnnnnnnccctaaccccataaatcaccttctcgatcggatacgcatgaggct

SEQ ID NO: 5264 - DNA, 146 bp, Artificial Sequence
  Bisulfite Padlock Probe
  misc_feature 96, 97, 98, 99, 100, 101: n = A,T,C or G
gactggaagagcactgttctaaaaactcgaatatatttaaaaaccctgttggaggctcatcgttcctattcaggcagatgttatcgaggtccgacnnnnnnccctaaccccataaatcgccttctcgatcggatacgcatgaggct

SEQ ID NO: 5265 - DNA, 146 bp, Artificial Sequence
  Bisulfite Padlock Probe
  misc_feature 96, 97, 98, 99, 100, 101: n = A,T,C or G
gactggaagagcactgttctaaaaatacgaaaaacgaaatacaaaaagttggaggctcatcgttcctattcaggcagatgttatcgaggtccgacnnnnnnccgaaaacgctacgcaacccttaacgatcggatacgcatgaggct

SEQ ID NO: 5266 - DNA, 146 bp, Artificial Sequence
  Bisulfite Padlock Probe
  misc_feature 96, 97, 98, 99, 100, 101: n = A,T,C or G
gactggaagagcactgttctaaaaatacgaaaaacgaaatacgaaaagttggaggctcatcgttcctattcaggcagatgttatcgaggtccgacnnnnnnccgaaaacgctacgcgacccttaacgatcggatacgcatgaggct

SEQ ID NO: 5267 - DNA, 146 bp, Artificial Sequence
  Bisulfite Padlock Probe
  misc_feature 94, 95, 96, 97, 98, 99: n = A,T,C or G
gactggaagagcactgttctaaaaatacgattcaactcaaccaaagttggaggctcatcgttcctattcaggcagatgttatcgaggtccgacnnnnnnatactaaccgaactacacctcctcattgatcggatacgcatgaggct

SEQ ID NO: 5268 - DNA, 146 bp, Artificial Sequence
  Bisulfite Padlock Probe
  misc_feature 94, 95, 96, 97, 98, 99: n = A,T,C or G
gactggaagagcactgttctaaaaatacgattcaactcgaccaaagttggaggctcatcgttcctattcaggcagatgttatcgaggtccgacnnnnnnatactaaccgaactacacctcctcgttgatcggatacgcatgaggct

SEQ ID NO: 5269 - DNA, 146 bp, Artificial Sequence
  Bisulfite Padlock Probe
  misc_feature 96, 97, 98, 99, 100, 101: n = A,T,C or G
gactggaagagcactgttctaaaaatccttaaactttaatcaaaaacgttggaggctcatcgttcctattcaggcagatgttatcgaggtccgacnnnnnnatacgaaccacaaaaccctccctccgatcggatacgcatgaggct

SEQ ID NO: 5270 - DNA, 146 bp, Artificial Sequence
  Bisulfite Padlock Probe
  misc_feature 96, 97, 98, 99, 100, 101: n = A,T,C or G
gactggaagagcactgttctaaaaatccttaaactttaatcgaaaacgttggaggctcatcgttcctattcaggcagatgttatcgaggtccgacnnnnnnatacgaaccgcaaaaccctccctccgatcggatacgcatgaggct

SEQ ID NO: 5271 - DNA, 146 bp, Artificial Sequence
  Bisulfite Padlock Probe
  misc_feature 96, 97, 98, 99, 100, 101: n = A,T,C or G
gactggaagagcactgttctaaaaattaaaaacgaccaaaacaaaaagttggaggctcatcgttcctattcaggcagatgttatcgaggtccgacnnnnnnaaaaacttccaaacccgacactctcgatcggatacgcatgaggct

SEQ ID NO: 5272 - DNA, 146 bp, Artificial Sequence
  Bisulfite Padlock Probe
  misc_feature 96, 97, 98, 99, 100, 101: n = A,T,C or G
gactggaagagcactgttctaaaaattaaaaacgaccgaaacaaaaagttggaggctcatcgttcctattcaggcagatgttatcgaggtccgacnnnnnnaaaaacttccaaacccgacgctctcgatcggatacgcatgaggct

SEQ ID NO: 5273 - DNA, 146 bp, Artificial Sequence
  Bisulfite Padlock Probe
  misc_feature 93, 94, 95, 96, 97, 98: n = A,T,C or G
gactggaagagcactgttctaaaaattcaaacccctactaaaaagttggaggctcatcgttcctattcaggcagatgttatcgaggtccgacnnnnnncaaaaatttcacctaccgcaaccttcccgatcggatacgcatgaggct

SEQ ID NO: 5274 - DNA, 146 bp, Artificial Sequence
  Bisulfite Padlock Probe
  misc_feature 93, 94, 95, 96, 97, 98: n = A,T,C or G
gactggaagagcactgttctaaaaattcgaacccctactaaaaagttggaggctcatcgttcctattcaggcagatgttatcgaggtccgacnnnnnncaaaaatttcacctaccgcgaccttcccgatcggatacgcatgaggct

SEQ ID NO: 5275 - DNA, 146 bp, Artificial Sequence
  Bisulfite Padlock Probe
  misc_feature 92, 93, 94, 95, 96, 97: n = A,T,C or G
gactggaagagcactgttctaaaacaactatcaaaacttcaccgttggaggctcatcgttcctattcaggcagatgttatcgaggtccgacnnnnnnaaaaatctataatacgaatcgccccaaaagatcggatacgcatgaggct

SEQ ID NO: 5276 - DNA, 146 bp, Artificial Sequence
  Bisulfite Padlock Probe
  misc_feature 92, 93, 94, 95, 96, 97: n = A,T,C or G
gactggaagagcactgttctaaaacaactatcaaaacttcgccgttggaggctcatcgttcctattcaggcagatgttatcgaggtccgacnnnnnnaaaaatctataatacgaatcgccccgaaagatcggatacgcatgaggct

SEQ ID NO: 5277 - DNA, 146 bp, Artificial Sequence
  Bisulfite Padlock Probe
  misc_feature 92, 93, 94, 95, 96, 97: n = A,T,C or G
gactggaagagcactgttctaaaaccccatcaccctattattcgttggaggctcatcgttcctattcaggcagatgttatcgaggtccgacnnnnnntatacacttatctatttacaaacaaaaccgatcggatacgcatgaggct

SEQ ID NO: 5278 - DNA, 146 bp, Artificial Sequence
  Bisulfite Padlock Probe
  misc_feature 92, 93, 94, 95, 96, 97: n = A,T,C or G
gactggaagagcactgttctaaaaccgcaccccttactctaccgttggaggctcatcgttcctattcaggcagatgttatcgaggtccgacnnnnnntcaacaatacttaacacgctcaaactatagatcggatacgcatgaggct

SEQ ID NO: 5279 - DNA, 146 bp, Artificial Sequence
  Bisulfite Padlock Probe
  misc_feature 92, 93, 94, 95, 96, 97: n = A,T,C or G
gactggaagagcactgttctaaaaccgcgccccttactctaccgttggaggctcatcgttcctattcaggcagatgttatcgaggtccgacnnnnnntcaacaatacttaacacgctcgaactatagatcggatacgcatgaggct

SEQ ID NO: 5280 - DNA, 146 bp, Artificial Sequence
  Bisulfite Padlock Probe
  misc_feature 93, 94, 95, 96, 97, 98: n = A,T,C or G
gactggaagagcactgttctaaaacctaactccctcctaactacgttggaggctcatcgttcctattcaggcagatgttatcgaggtccgacnnnnnnttctctcgcgaacccaacaaaactatacgatcggatacgcatgaggct

SEQ ID NO: 5281 - DNA, 146 bp, Artificial Sequence
  Bisulfite Padlock Probe
  misc_feature 93, 94, 95, 96, 97, 98: n = A,T,C or G
gactggaagagcactgttctaaaacctaactccctcctaactacgttggaggctcatcgttcctattcaggcagatgttatcgaggtccgacnnnnnnttctctcgcgaacccaacgaaactatacgatcggatacgcatgaggct

SEQ ID NO: 5282 - DNA, 146 bp, Artificial Sequence
  Bisulfite Padlock Probe
  misc_feature 92, 93, 94, 95, 96, 97: n = A,T,C or G
gactggaagagcactgttctaaaacctccttaaccgaaccatcgttggaggctcatcgttcctattcaggcagatgttatcgaggtccgacnnnnnnaaaccccaacttaacctcacaaacctaaagatcggatacgcatgaggct

SEQ ID NO: 5283 - DNA, 146 bp, Artificial Sequence
  Bisulfite Padlock Probe
  misc_feature 92, 93, 94, 95, 96, 97: n = A,T,C or G
gactggaagagcactgttctaaaacctccttaaccgaaccgtcgttggaggctcatcgttcctattcaggcagatgttatcgaggtccgacnnnnnnaaaccccaacttaacctcgcaaacctaaagatcggatacgcatgaggct

SEQ ID NO: 5284 - DNA, 146 bp, Artificial Sequence
  Bisulfite Padlock Probe
  misc_feature 94, 95, 96, 97, 98, 99: n = A,T,C or G
gactggaagagcactgttctaaaactaaaactaaaactactactagttggaggctcatcgttcctattcaggcagatgttatcgaggtccgacnnnnnnatatccgaactacccaaaacctccccagatcggatacgcatgaggct

SEQ ID NO: 5285 - DNA, 146 bp, Artificial Sequence
  Bisulfite Padlock Probe
  misc_feature 94, 95, 96, 97, 98, 99: n = A,T,C or G
gactggaagagcactgttctaaaactaaaactaaaactactactagttggaggctcatcgttcctattcaggcagatgttatcgaggtccgacnnnnnnatatccgaactacccgaaacctccccagatcggatacgcatgaggct

SEQ ID NO: 5286 - DNA, 146 bp, Artificial Sequence
  Bisulfite Padlock Probe
  misc_feature 96, 97, 98, 99, 100, 101: n = A,T,C or G
gactggaagagcactgttctaaaactccgaatatacaaaataactccgttggaggctcatcgttcctattcaggcagatgttatcgaggtccgacnnnnnnccctccccaccctatccccaatttcgatcggatacgcatgaggct

SEQ ID NO: 5287 - DNA, 146 bp, Artificial Sequence
  Bisulfite Padlock Probe
  misc_feature 96, 97, 98, 99, 100, 101: n = A,T,C or G
gactggaagagcactgttctaaaactccgaatatacgaaataactccgttggaggctcatcgttcctattcaggcagatgttatcgaggtccgacnnnnnnccctccccaccctatccccaatttcgatcggatacgcatgaggct

SEQ ID NO: 5288 - DNA, 146 bp, Artificial Sequence
  Bisulfite Padlock Probe
  misc_feature 96, 97, 98, 99, 100, 101: n = A,T,C or G
gactggaagagcactgttctaaaatccaaaacactaaaaacaaaaacgttggaggctcatcgttcctattcaggcagatgttatcgaggtccgacnnnnnnaaaaatccgaaatacgaaccaaaaagatcggatacgcatgaggct

SEQ ID NO: 5289 - DNA, 146 bp, Artificial Sequence
  Bisulfite Padlock Probe
  misc_feature 94, 95, 96, 97, 98, 99: n = A,T,C or G
gactggaagagcactgttctaaaatccaaaatcaaaaatcttctagttggaggctcatcgttcctattcaggcagatgttatcgaggtccgacnnnnnnaaaactcccatccaaaatatactaatcgatcggatacgcatgaggct

SEQ ID NO: 5290 - DNA, 146 bp, Artificial Sequence
  Bisulfite Padlock Probe
  misc_feature 94, 95, 96, 97, 98, 99: n = A,T,C or G
gactggaagagcactgttctaaaatccaaaatcaaaaatcttctagttggaggctcatcgttcctattcaggcagatgttatcgaggtccgacnnnnnnaaaactcccgtccaaaatatactaatcgatcggatacgcatgaggct

SEQ ID NO: 5291 - DNA, 146 bp, Artificial Sequence
  Bisulfite Padlock Probe
  misc_feature 92, 93, 94, 95, 96, 97: n = A,T,C or G
gactggaagagcactgttctaaaatcccatctcctaaaacctcgttggaggctcatcgttcctattcaggcagatgttatcgaggtccgacnnnnnnaactaaaaatacaactataaaactaaaacgatcggatacgcatgaggct

SEQ ID NO: 5292 - DNA, 146 bp, Artificial Sequence
  Bisulfite Padlock Probe
  misc_feature 96, 97, 98, 99, 100, 101: n = A,T,C or G
gactggaagagcactgttctaaaatccgaaacactaaaaacaaaaacgttggaggctcatcgttcctattcaggcagatgttatcgaggtccgacnnnnnnaaaaatccgaaatacgaaccgaaaagatcggatacgcatgaggct

SEQ ID NO: 5293 - DNA, 146 bp, Artificial Sequence
  Bisulfite Padlock Probe
  misc_feature 92, 93, 94, 95, 96, 97: n = A,T,C or G
gactggaagagcactgttctaaacaaaactcgcctataccaatgttggaggctcatcgttcctattcaggcagatgttatcgaggtccgacnnnnnnaaactccccgaaaacacctaaacttctccgatcggatacgcatgaggct

SEQ ID NO: 5294 - DNA, 146 bp, Artificial Sequence
  Bisulfite Padlock Probe
  misc_feature 92, 93, 94, 95, 96, 97: n = A,T,C or G
gactggaagagcactgttctaaacaaaactcgcctataccgatgttggaggctcatcgttcctattcaggcagatgttatcgaggtccgacnnnnnnaaactccccgaaaacgcctaaacttctccgatcggatacgcatgaggct

SEQ ID NO: 5295 - DNA, 146 bp, Artificial Sequence
  Bisulfite Padlock Probe
  misc_feature 93, 94, 95, 96, 97, 98: n = A,T,C or G
gactggaagagcactgttctaaacaacaaaacatacctaactccgttggaggctcatcgttcctattcaggcagatgttatcgaggtccgacnnnnnnctatttaacccatttatacaacaaaaatgatcggatacgcatgaggct

SEQ ID NO: 5296 - DNA, 146 bp, Artificial Sequence
  Bisulfite Padlock Probe
  misc_feature 93, 94, 95, 96, 97, 98: n = A,T,C or G
gactggaagagcactgttctaaacaacgaaacatacctaactccgttggaggctcatcgttcctattcaggcagatgttatcgaggtccgacnnnnnnctatttaacccatttatacaacaaaaatgatcggatacgcatgaggct

SEQ ID NO: 5297 - DNA, 146 bp, Artificial Sequence
  Bisulfite Padlock Probe
  misc_feature 96, 97, 98, 99, 100, 101: n = A,T,C or G
gactggaagagcactgttctaaaccacccaaacttaacaaaaacatcgttggaggctcatcgttcctattcaggcagatgttatcgaggtccgacnnnnnnctcaacccaaactaaaaatctcctcgatcggatacgcatgaggct

SEQ ID NO: 5298 - DNA, 146 bp, Artificial Sequence
  Bisulfite Padlock Probe
  misc_feature 96, 97, 98, 99, 100, 101: n = A,T,C or G
gactggaagagcactgttctaaaccacccaaacttaacgaaaacatcgttggaggctcatcgttcctattcaggcagatgttatcgaggtccgacnnnnnnctcaacccaaactaaaaatctcctcgatcggatacgcatgaggct

SEQ ID NO: 5299 - DNA, 146 bp, Artificial Sequence
  Bisulfite Padlock Probe
  misc_feature 95, 96, 97, 98, 99, 100: n = A,T,C or G
gactggaagagcactgttctaaacccaacaaacgaaactcaaccaagttggaggctcatcgttcctattcaggcagatgttatcgaggtccgacnnnnnnaaaaattatcgacgaacaacaaacacgatcggatacgcatgaggct

SEQ ID NO: 5300 - DNA, 146 bp, Artificial Sequence
  Bisulfite Padlock Probe
  misc_feature 95, 96, 97, 98, 99, 100: n = A,T,C or G
gactggaagagcactgttctaaacccaacaaacgaaactcgaccaagttggaggctcatcgttcctattcaggcagatgttatcgaggtccgacnnnnnnaaaaattatcgacgaacaacaaacgcgatcggatacgcatgaggct

SEQ ID NO: 5301 - DNA, 146 bp, Artificial Sequence
  Bisulfite Padlock Probe
  misc_feature 92, 93, 94, 95, 96, 97: n = A,T,C or G
gactggaagagcactgttctaaacccacccttttattacaaaagttggaggctcatcgttcctattcaggcagatgttatcgaggtccgacnnnnnnaaaaacactaaaacttaacacaaactttagatcggatacgcatgaggct

SEQ ID NO: 5302 - DNA, 146 bp, Artificial Sequence
  Bisulfite Padlock Probe
  misc_feature 92, 93, 94, 95, 96, 97: n = A,T,C or G
gactggaagagcactgttctaaacccacccttttattacaaaagttggaggctcatcgttcctattcaggcagatgttatcgaggtccgacnnnnnnaaaaacactaaaacttaacgcaaactttagatcggatacgcatgaggct

SEQ ID NO: 5303 - DNA, 146 bp, Artificial Sequence
  Bisulfite Padlock Probe
  misc_feature 94, 95, 96, 97, 98, 99: n = A,T,C or G
gactggaagagcactgttctaaacccccaaacccaccaccaaaaagttggaggctcatcgttcctattcaggcagatgttatcgaggtccgacnnnnnnaaaaaccccgctaccaaccccaaaatagatcggatacgcatgaggct

SEQ ID NO: 5304 - DNA, 146 bp, Artificial Sequence
  Bisulfite Padlock Probe
  misc_feature 94, 95, 96, 97, 98, 99: n = A,T,C or G
gactggaagagcactgttctaaacccccaaacccaccaccaaaaagttggaggctcatcgttcctattcaggcagatgttatcgaggtccgacnnnnnnaaaaaccccgctaccaaccccgaaatagatcggatacgcatgaggct

SEQ ID NO: 5305 - DNA, 146 bp, Artificial Sequence
  Bisulfite Padlock Probe
  misc_feature 92, 93, 94, 95, 96, 97: n = A,T,C or G
gactggaagagcactgttctaaacccgaaccacgcctacaacagttggaggctcatcgttcctattcaggcagatgttatcgaggtccgacnnnnnnaaaaacaacgccgaaaacaaccaaatctagatcggatacgcatgaggct

SEQ ID NO: 5306 - DNA, 146 bp, Artificial Sequence
  Bisulfite Padlock Probe
  misc_feature 92, 93, 94, 95, 96, 97: n = A,T,C or G
gactggaagagcactgttctaaacccgaaccacgcctacaacggttggaggctcatcgttcctattcaggcagatgttatcgaggtccgacnnnnnnaaaaacaacgccgaaaacaaccgaatctagatcggatacgcatgaggct

SEQ ID NO: 5307 - DNA, 146 bp, Artificial Sequence
  Bisulfite Padlock Probe
  misc_feature 96, 97, 98, 99, 100, 101: n = A,T,C or G
gactggaagagcactgttctaaaccctatttatacctttactaccctgttggaggctcatcgttcctattcaggcagatgttatcgaggtccgacnnnnnnaaataaccccaaaaccaccctccccgatcggatacgcatgaggct

SEQ ID NO: 5308 - DNA, 146 bp, Artificial Sequence
  Bisulfite Padlock Probe
  misc_feature 96, 97, 98, 99, 100, 101: n = A,T,C or G
gactggaagagcactgttctaaaccctatttatacctttactaccctgttggaggctcatcgttcctattcaggcagatgttatcgaggtccgacnnnnnnaaataaccccgaaaccaccctccccgatcggatacgcatgaggct

SEQ ID NO: 5309 - DNA, 146 bp, Artificial Sequence
  Bisulfite Padlock Probe
  misc_feature 93, 94, 95, 96, 97, 98: n = A,T,C or G
gactggaagagcactgttctaaaccgcgcgactacaaccaaaaagttggaggctcatcgttcctattcaggcagatgttatcgaggtccgacnnnnnnaaaaccgcaacgctttacaaaaccaaccgatcggatacgcatgaggct

SEQ ID NO: 5310 - DNA, 146 bp, Artificial Sequence
  Bisulfite Padlock Probe
  misc_feature 93, 94, 95, 96, 97, 98: n = A,T,C or G
gactggaagagcactgttctaaaccgcgcgactacaaccgaaaagttggaggctcatcgttcctattcaggcagatgttatcgaggtccgacnnnnnnaaaaccgcaacgctttacaaaaccgaccgatcggatacgcatgaggct

SEQ ID NO: 5311 - DNA, 146 bp, Artificial Sequence
  Bisulfite Padlock Probe
  misc_feature 96, 97, 98, 99, 100, 101: n = A,T,C or G
gactggaagagcactgttctaaacctaaacacctaccaaaacccctcgttggaggctcatcgttcctattcaggcagatgttatcgaggtccgacnnnnnnacaacgaactcgtcccaaatacaaagatcggatacgcatgaggct

SEQ ID NO: 5312 - DNA, 146 bp, Artificial Sequence
  Bisulfite Padlock Probe
  misc_feature 96, 97, 98, 99, 100, 101: n = A,T,C or G
gactggaagagcactgttctaaacctaaacacctaccgaaacccctcgttggaggctcatcgttcctattcaggcagatgttatcgaggtccgacnnnnnnacaacgaactcgtcccgaatacaaagatcggatacgcatgaggct

SEQ ID NO: 5313 - DNA, 146 bp, Artificial Sequence
  Bisulfite Padlock Probe
  misc_feature 93, 94, 95, 96, 97, 98: n = A,T,C or G
gactggaagagcactgttctaaacgacgatctaaaacgcatcccgttggaggctcatcgttcctattcaggcagatgttatcgaggtccgacnnnnnncacctaccaaccctctccctccactaacgatcggatacgcatgaggct

SEQ ID NO: 5314 - DNA, 146 bp, Artificial Sequence
  Bisulfite Padlock Probe
  misc_feature 93, 94, 95, 96, 97, 98: n = A,T,C or G
gactggaagagcactgttctaaacgacgatctaaaacgcgtcccgttggaggctcatcgttcctattcaggcagatgttatcgaggtccgacnnnnnncacctaccaaccctctccctccactaacgatcggatacgcatgaggct

SEQ ID NO: 5315 - DNA, 146 bp, Artificial Sequence
  Bisulfite Padlock Probe
  misc_feature 92, 93, 94, 95, 96, 97: n = A,T,C or G
gactggaagagcactgttctaaacgcaaaactaaactaaacccgttggaggctcatcgttcctattcaggcagatgttatcgaggtccgacnnnnnnaatcgattaatattttatacacctaaaaagatcggatacgcatgaggct

SEQ ID NO: 5316 - DNA, 146 bp, Artificial Sequence
  Bisulfite Padlock Probe
  misc_feature 93, 94, 95, 96, 97, 98: n = A,T,C or G
gactggaagagcactgttctaaacgccaatacaacctcccccacgttggaggctcatcgttcctattcaggcagatgttatcgaggtccgacnnnnnntccactcccgatctccacaacttaaacagatcggatacgcatgaggct

SEQ ID NO: 5317 - DNA, 146 bp, Artificial Sequence
  Bisulfite Padlock Probe
  misc_feature 93, 94, 95, 96, 97, 98: n = A,T,C or G
gactggaagagcactgttctaaacgccgatacaacctcccccacgttggaggctcatcgttcctattcaggcagatgttatcgaggtccgacnnnnnntccactcccgatctccacgacttaaacagatcggatacgcatgaggct

SEQ ID NO: 5318 - DNA, 146 bp, Artificial Sequence
  Bisulfite Padlock Probe
  misc_feature 92, 93, 94, 95, 96, 97: n = A,T,C or G
gactggaagagcactgttctaaacgcgaaactaaactaaacccgttggaggctcatcgttcctattcaggcagatgttatcgaggtccgacnnnnnnaatcgattaatattttatacgcctaaaaagatcggatacgcatgaggct

SEQ ID NO: 5319 - DNA, 146 bp, Artificial Sequence
  Bisulfite Padlock Probe
  misc_feature 93, 94, 95, 96, 97, 98: n = A,T,C or G
gactggaagagcactgttctaaacgcgaccgccaaaaaatacaagttggaggctcatcgttcctattcaggcagatgttatcgaggtccgacnnnnnnatacctatactaatcaaaaacaacaaacgatcggatacgcatgaggct

SEQ ID NO: 5320 - DNA, 146 bp, Artificial Sequence
  Bisulfite Padlock Probe
  misc_feature 93, 94, 95, 96, 97, 98: n = A,T,C or G
gactggaagagcactgttctaaacgcgaccgccgaaaaatacaagttggaggctcatcgttcctattcaggcagatgttatcgaggtccgacnnnnnnatacctatactaatcaaaaacgacaaacgatcggatacgcatgaggct

SEQ ID NO: 5321 - DNA, 146 bp, Artificial Sequence
  Bisulfite Padlock Probe
  misc_feature 94, 95, 96, 97, 98, 99: n = A,T,C or G
gactggaagagcactgttctaaacgctaaaaaccgaatctcataagttggaggctcatcgttcctattcaggcagatgttatcgaggtccgacnnnnnnacactcacaaataactaccactaaacagatcggatacgcatgaggct

SEQ ID NO: 5322 - DNA, 146 bp, Artificial Sequence
  Bisulfite Padlock Probe
  misc_feature 94, 95, 96, 97, 98, 99: n = A,T,C or G
gactggaagagcactgttctaaacgctaaaaaccgaatctcgtaagttggaggctcatcgttcctattcaggcagatgttatcgaggtccgacnnnnnnacactcacaaataactaccgctaaacagatcggatacgcatgaggct

SEQ ID NO: 5323 - DNA, 146 bp, Artificial Sequence
  Bisulfite Padlock Probe
  misc_feature 93, 94, 95, 96, 97, 98: n = A,T,C or G
gactggaagagcactgttctaaactaaactaaactaaactaaacgttggaggctcatcgttcctattcaggcagatgttatcgaggtccgacnnnnnnaatattcccaacccctaaccctcatcccgatcggatacgcatgaggct

SEQ ID NO: 5324 - DNA, 146 bp, Artificial Sequence
  Bisulfite Padlock Probe
  misc_feature 94, 95, 96, 97, 98, 99: n = A,T,C or G
gactggaagagcactgttctaaactacacaccccaaacccaaaccgttggaggctcatcgttcctattcaggcagatgttatcgaggtccgacnnnnnncacttccaaatcaatatactctacaccgatcggatacgcatgaggct

SEQ ID NO: 5325 - DNA, 146 bp, Artificial Sequence
  Bisulfite Padlock Probe
  misc_feature 94, 95, 96, 97, 98, 99: n = A,T,C or G
gactggaagagcactgttctaaactacacaccccaaacccgaaccgttggaggctcatcgttcctattcaggcagatgttatcgaggtccgacnnnnnncacttccaaatcaatatactctacgccgatcggatacgcatgaggct

SEQ ID NO: 5326 - DNA, 146 bp, Artificial Sequence
  Bisulfite Padlock Probe
  misc_feature 93, 94, 95, 96, 97, 98: n = A,T,C or G
gactggaagagcactgttctaaactattcaaaactaaactctacgttggaggctcatcgttcctattcaggcagatgttatcgaggtccgacnnnnnnacaaaacgtaaaaattttacactaaaaagatcggatacgcatgaggct

SEQ ID NO: 5327 - DNA, 146 bp, Artificial Sequence
  Bisulfite Padlock Probe
  misc_feature 93, 94, 95, 96, 97, 98: n = A,T,C or G
gactggaagagcactgttctaaactattcaaaactaaactctacgttggaggctcatcgttcctattcaggcagatgttatcgaggtccgacnnnnnnacaaaacgtaaaaattttacgctaaaaagatcggatacgcatgaggct

SEQ ID NO: 5328 - DNA, 146 bp, Artificial Sequence
  Bisulfite Padlock Probe
  misc_feature 92, 93, 94, 95, 96, 97: n = A,T,C or G
gactggaagagcactgttctaaactcaaacccaaaactaactagttggaggctcatcgttcctattcaggcagatgttatcgaggtccgacnnnnnnaatcaaaaaccgaaccgaaccaaaaatacgatcggatacgcatgaggct

SEQ ID NO: 5329 - DNA, 146 bp, Artificial Sequence
  Bisulfite Padlock Probe
  misc_feature 92, 93, 94, 95, 96, 97: n = A,T,C or G
gactggaagagcactgttctaaactcaaacccaaaactaactagttggaggctcatcgttcctattcaggcagatgttatcgaggtccgacnnnnnnaatcaaaaaccgaaccgaaccgaaaatacgatcggatacgcatgaggct

SEQ ID NO: 5330 - DNA, 146 bp, Artificial Sequence
  Bisulfite Padlock Probe
  misc_feature 92, 93, 94, 95, 96, 97: n = A,T,C or G
gactggaagagcactgttctaaactcactaaaattcaaattaagttggaggctcatcgttcctattcaggcagatgttatcgaggtccgacnnnnnnatcctaaacattaataatacaataaaaatgatcggatacgcatgaggct

SEQ ID NO: 5331 - DNA, 146 bp, Artificial Sequence
  Bisulfite Padlock Probe
  misc_feature 95, 96, 97, 98, 99, 100: n = A,T,C or G
gactggaagagcactgttctaaactctaaaaacacctcatcaaaaagttggaggctcatcgttcctattcaggcagatgttatcgaggtccgacnnnnnnaaacccttacaccccaaaaacaaaaagatcggatacgcatgaggct

SEQ ID NO: 5332 - DNA, 146 bp, Artificial Sequence
  Bisulfite Padlock Probe
  misc_feature 95, 96, 97, 98, 99, 100: n = A,T,C or G
gactggaagagcactgttctaaactctaaaaacgcctcatcaaaaagttggaggctcatcgttcctattcaggcagatgttatcgaggtccgacnnnnnnaaacccttacaccccgaaaacaaaaagatcggatacgcatgaggct

SEQ ID NO: 5333 - DNA, 146 bp, Artificial Sequence
  Bisulfite Padlock Probe
  misc_feature 95, 96, 97, 98, 99, 100: n = A,T,C or G
gactggaagagcactgttctaaacttactactcattttaacacctcgttggaggctcatcgttcctattcaggcagatgttatcgaggtccgacnnnnnnaaaaacccgacccgaacaaaaaatacgatcggatacgcatgaggct

SEQ ID NO: 5334 - DNA, 146 bp, Artificial Sequence
  Bisulfite Padlock Probe
  misc_feature 95, 96, 97, 98, 99, 100: n = A,T,C or G
gactggaagagcactgttctaaacttactactcattttaacgcctcgttggaggctcatcgttcctattcaggcagatgttatcgaggtccgacnnnnnnaaaaacccgacccgaacgaaaaatacgatcggatacgcatgaggct

SEQ ID NO: 5335 - DNA, 146 bp, Artificial Sequence
  Bisulfite Padlock Probe
  misc_feature 96, 97, 98, 99, 100, 101: n = A,T,C or G
gactggaagagcactgttctaaacttctccgactcaaactcctaatcgttggaggctcatcgttcctattcaggcagatgttatcgaggtccgacnnnnnnaaaactccatttttcttataaaaccgatcggatacgcatgaggct

SEQ ID NO: 5336 - DNA, 146 bp, Artificial Sequence
  Bisulfite Padlock Probe
  misc_feature 96, 97, 98, 99, 100, 101: n = A,T,C or G
gactggaagagcactgttctaaacttctccgactcgaactcctaatcgttggaggctcatcgttcctattcaggcagatgttatcgaggtccgacnnnnnnaaaactccgtttttcttataaaaccgatcggatacgcatgaggct

SEQ ID NO: 5337 - DNA, 146 bp, Artificial Sequence
  Bisulfite Padlock Probe
  misc_feature 96, 97, 98, 99, 100, 101: n = A,T,C or G
gactggaagagcactgttctaaataaaaataaataatcactaccaacgttggaggctcatcgttcctattcaggcagatgttatcgaggtccgacnnnnnnacaacgaacaacctacgacaaaatcgatcggatacgcatgaggct

SEQ ID NO: 5338 - DNA, 146 bp, Artificial Sequence
  Bisulfite Padlock Probe
  misc_feature 96, 97, 98, 99, 100, 101: n = A,T,C or G
gactggaagagcactgttctaaataaaaataaataatcactaccaacgttggaggctcatcgttcctattcaggcagatgttatcgaggtccgacnnnnnnacaacgaacaacctacgacgaaatcgatcggatacgcatgaggct

SEQ ID NO: 5339 - DNA, 146 bp, Artificial Sequence
  Bisulfite Padlock Probe
  misc_feature 93, 94, 95, 96, 97, 98: n = A,T,C or G
gactggaagagcactgttctaaataaaacaacaaccaccccaaagttggaggctcatcgttcctattcaggcagatgttatcgaggtccgacnnnnnnaataaaaaccccaaaactacaaataaaagatcggatacgcatgaggct

SEQ ID NO: 5340 - DNA, 146 bp, Artificial Sequence
  Bisulfite Padlock Probe
  misc_feature 93, 94, 95, 96, 97, 98: n = A,T,C or G
gactggaagagcactgttctaaataaaacaacgaccaccccaaagttggaggctcatcgttcctattcaggcagatgttatcgaggtccgacnnnnnnaataaaaaccccaaaactacaaataaaagatcggatacgcatgaggct

SEQ ID NO: 5341 - DNA, 146 bp, Artificial Sequence
  Bisulfite Padlock Probe
  misc_feature 93, 94, 95, 96, 97, 98: n = A,T,C or G
gactggaagagcactgttctaaataacttaatctacttctctccgttggaggctcatcgttcctattcaggcagatgttatcgaggtccgacnnnnnnactaaatacaaccaaaacataaccaaacgatcggatacgcatgaggct

SEQ ID NO: 5342 - DNA, 146 bp, Artificial Sequence
  Bisulfite Padlock Probe
  misc_feature 93, 94, 95, 96, 97, 98: n = A,T,C or G
gactggaagagcactgttctaaataacttaatctacttctctccgttggaggctcatcgttcctattcaggcagatgttatcgaggtccgacnnnnnnactaaatacgaccaaaacataaccaaacgatcggatacgcatgaggct

SEQ ID NO: 5343 - DNA, 146 bp, Artificial Sequence
  Bisulfite Padlock Probe
  misc_feature 95, 96, 97, 98, 99, 100: n = A,T,C or G
gactggaagagcactgttctaaatacaaacgacgctaccgtcaaaagttggaggctcatcgttcctattcaggcagatgttatcgaggtccgacnnnnnnaaaaacgacctaccgcaaaaacctccgatcggatacgcatgaggct

SEQ ID NO: 5344 - DNA, 146 bp, Artificial Sequence
  Bisulfite Padlock Probe
  misc_feature 95, 96, 97, 98, 99, 100: n = A,T,C or G
gactggaagagcactgttctaaatacaaacgacgctaccgtcgaaagttggaggctcatcgttcctattcaggcagatgttatcgaggtccgacnnnnnnaaaaacgacctaccgcgaaaacctccgatcggatacgcatgaggct

SEQ ID NO: 5345 - DNA, 146 bp, Artificial Sequence
  Bisulfite Padlock Probe
  misc_feature 92, 93, 94, 95, 96, 97: n = A,T,C or G
gactggaagagcactgttctaaatacccaatcctaaactaaaagttggaggctcatcgttcctattcaggcagatgttatcgaggtccgacnnnnnnaaaccacctcctaacccaaaaacaaaacagatcggatacgcatgaggct

SEQ ID NO: 5346 - DNA, 146 bp, Artificial Sequence
  Bisulfite Padlock Probe
  misc_feature 92, 93, 94, 95, 96, 97: n = A,T,C or G
gactggaagagcactgttctaaatacccgatcctaaactaaaagttggaggctcatcgttcctattcaggcagatgttatcgaggtccgacnnnnnnaaaccacctcctaacccgaaaacaaaacagatcggatacgcatgaggct

SEQ ID NO: 5347 - DNA, 146 bp, Artificial Sequence
  Bisulfite Padlock Probe
  misc_feature 94, 95, 96, 97, 98, 99: n = A,T,C or G
gactggaagagcactgttctaaatatttaaaccataattataaaagttggaggctcatcgttcctattcaggcagatgttatcgaggtccgacnnnnnnattcgtacccaaactaatcctaaccccgatcggatacgcatgaggct

SEQ ID NO: 5348 - DNA, 146 bp, Artificial Sequence
  Bisulfite Padlock Probe
  misc_feature 94, 95, 96, 97, 98, 99: n = A,T,C or G
gactggaagagcactgttctaaatatttaaaccgtaattataaaagttggaggctcatcgttcctattcaggcagatgttatcgaggtccgacnnnnnnattcgtacccgaactaatcctaaccccgatcggatacgcatgaggct

SEQ ID NO: 5349 - DNA, 146 bp, Artificial Sequence
  Bisulfite Padlock Probe
  misc_feature 95, 96, 97, 98, 99, 100: n = A,T,C or G
gactggaagagcactgttctaaatcccaaatacgcgaccaaaatccgttggaggctcatcgttcctattcaggcagatgttatcgaggtccgacnnnnnnaaatacgcgttcctcctcccacatacgatcggatacgcatgaggct

SEQ ID NO: 5350 - DNA, 146 bp, Artificial Sequence
  Bisulfite Padlock Probe
  misc_feature 95, 96, 97, 98, 99, 100: n = A,T,C or G
gactggaagagcactgttctaaatcccaaatacgcgaccgaaatccgttggaggctcatcgttcctattcaggcagatgttatcgaggtccgacnnnnnnaaatacgcgttcctcctcccgcatacgatcggatacgcatgaggct

SEQ ID NO: 5351 - DNA, 146 bp, Artificial Sequence
  Bisulfite Padlock Probe
  misc_feature 92, 93, 94, 95, 96, 97: n = A,T,C or G
gactggaagagcactgttctaaatctccccgcgacgaaccaacgttggaggctcatcgttcctattcaggcagatgttatcgaggtccgacnnnnnncccacctacaacaacaacaccgcaataatgatcggatacgcatgaggct

SEQ ID NO: 5352 - DNA, 146 bp, Artificial Sequence
  Bisulfite Padlock Probe
  misc_feature 92, 93, 94, 95, 96, 97: n = A,T,C or G
gactggaagagcactgttctaaatctccccgcgacgaaccgacgttggaggctcatcgttcctattcaggcagatgttatcgaggtccgacnnnnnncccacctacaacaacaacaccgcgataatgatcggatacgcatgaggct

SEQ ID NO: 5353 - DNA, 146 bp, Artificial Sequence
  Bisulfite Padlock Probe
  misc_feature 94, 95, 96, 97, 98, 99: n = A,T,C or G
gactggaagagcactgttctaacaaaaccatatccaaatcaaaacgttggaggctcatcgttcctattcaggcagatgttatcgaggtccgacnnnnnnacttattataaaccccacaacctcctcgatcggatacgcatgaggct

SEQ ID NO: 5354 - DNA, 146 bp, Artificial Sequence
  Bisulfite Padlock Probe
  misc_feature 94, 95, 96, 97, 98, 99: n = A,T,C or G
gactggaagagcactgttctaacaaaaccgtatccaaatcaaaacgttggaggctcatcgttcctattcaggcagatgttatcgaggtccgacnnnnnnacttattataaaccccacaacctcctcgatcggatacgcatgaggct

SEQ ID NO: 5355 - DNA, 146 bp, Artificial Sequence
  Bisulfite Padlock Probe
  misc_feature 96, 97, 98, 99, 100, 101: n = A,T,C or G
gactggaagagcactgttctaacaaacccaaaacccaactacaattcgttggaggctcatcgttcctattcaggcagatgttatcgaggtccgacnnnnnncgtcgcttcaaaaaataaacaacaagatcggatacgcatgaggct

SEQ ID NO: 5356 - DNA, 146 bp, Artificial Sequence
  Bisulfite Padlock Probe
  misc_feature 92, 93, 94, 95, 96, 97: n = A,T,C or G
gactggaagagcactgttctaacaaactaaatccaattccatcgttggaggctcatcgttcctattcaggcagatgttatcgaggtccgacnnnnnnaaacacaataatctatccttaaaaacaaagatcggatacgcatgaggct

SEQ ID NO: 5357 - DNA, 146 bp, Artificial Sequence
  Bisulfite Padlock Probe
  misc_feature 92, 93, 94, 95, 96, 97: n = A,T,C or G
gactggaagagcactgttctaacaaactaaatccgattccatcgttggaggctcatcgttcctattcaggcagatgttatcgaggtccgacnnnnnnaaacacaataatctatccttaaaaacaaagatcggatacgcatgaggct

SEQ ID NO: 5358 - DNA, 146 bp, Artificial Sequence
  Bisulfite Padlock Probe
  misc_feature 95, 96, 97, 98, 99, 100: n = A,T,C or G
gactggaagagcactgttctaacaacaacaaaaacaacaacaacaagttggaggctcatcgttcctattcaggcagatgttatcgaggtccgacnnnnnntcaaacaaacaaaaacaactaataccgatcggatacgcatgaggct

SEQ ID NO: 5359 - DNA, 146 bp, Artificial Sequence
  Bisulfite Padlock Probe
  misc_feature 95, 96, 97, 98, 99, 100: n = A,T,C or G
gactggaagagcactgttctaacaacaacaaaaacaacaacaacaagttggaggctcatcgttcctattcaggcagatgttatcgaggtccgacnnnnnntcaaacaaacgaaaacaactaataccgatcggatacgcatgaggct

SEQ ID NO: 5360 - DNA, 146 bp, Artificial Sequence
  Bisulfite Padlock Probe
  misc_feature 92, 93, 94, 95, 96, 97: n = A,T,C or G
gactggaagagcactgttctaacaacccctcccaaaataaaaagttggaggctcatcgttcctattcaggcagatgttatcgaggtccgacnnnnnnttcaattatctaaataataaattaaaatcgatcggatacgcatgaggct

SEQ ID NO: 5361 - DNA, 146 bp, Artificial Sequence
  Bisulfite Padlock Probe
  misc_feature 92, 93, 94, 95, 96, 97: n = A,T,C or G
gactggaagagcactgttctaacaacccctcccgaaataaaaagttggaggctcatcgttcctattcaggcagatgttatcgaggtccgacnnnnnnttcaattatctaaataataaattaaaatcgatcggatacgcatgaggct

SEQ ID NO: 5362 - DNA, 146 bp, Artificial Sequence
  Bisulfite Padlock Probe
  misc_feature 95, 96, 97, 98, 99, 100: n = A,T,C or G
gactggaagagcactgttctaacacccaacctcaatataaaccctcgttggaggctcatcgttcctattcaggcagatgttatcgaggtccgacnnnnnnattacctaaaaatccacaataaccccgatcggatacgcatgaggct

SEQ ID NO: 5363 - DNA, 146 bp, Artificial Sequence
  Bisulfite Padlock Probe
  misc_feature 95, 96, 97, 98, 99, 100: n = A,T,C or G
gactggaagagcactgttctaacacccgacctcaatataaaccctcgttggaggctcatcgttcctattcaggcagatgttatcgaggtccgacnnnnnnattacctaaaaatccacaataaccccgatcggatacgcatgaggct

SEQ ID NO: 5364 - DNA, 146 bp, Artificial Sequence
  Bisulfite Padlock Probe
  misc_feature 96, 97, 98, 99, 100, 101: n = A,T,C or G
gactggaagagcactgttctaacaccgcgtacatctaaccataaaacgttggaggctcatcgttcctattcaggcagatgttatcgaggtccgacnnnnnnctcgacgacctatcactaacctttcgatcggatacgcatgaggct

SEQ ID NO: 5365 - DNA, 146 bp, Artificial Sequence
  Bisulfite Padlock Probe
  misc_feature 96, 97, 98, 99, 100, 101: n = A,T,C or G
gactggaagagcactgttctaacaccgcgtacgtctaaccataaaacgttggaggctcatcgttcctattcaggcagatgttatcgaggtccgacnnnnnnctcgacgacctatcgctaacctttcgatcggatacgcatgaggct

SEQ ID NO: 5366 - DNA, 146 bp, Artificial Sequence
  Bisulfite Padlock Probe
  misc_feature 93, 94, 95, 96, 97, 98: n = A,T,C or G
gactggaagagcactgttctaaccaacactatttcaaaccctacgttggaggctcatcgttcctattcaggcagatgttatcgaggtccgacnnnnnnaaacccccgtacaaaaaactaaaaacacgatcggatacgcatgaggct

SEQ ID NO: 5367 - DNA, 146 bp, Artificial Sequence
  Bisulfite Padlock Probe
  misc_feature 92, 93, 94, 95, 96, 97: n = A,T,C or G
gactggaagagcactgttctaaccaaccgcgcaactcaaaaccgttggaggctcatcgttcctattcaggcagatgttatcgaggtccgacnnnnnnaaaaacctttccttctaaaaacaaaaccagatcggatacgcatgaggct

SEQ ID NO: 5368 - DNA, 146 bp, Artificial Sequence
  Bisulfite Padlock Probe
  misc_feature 92, 93, 94, 95, 96, 97: n = A,T,C or G
gactggaagagcactgttctaaccaaccgcgcgactcaaaaccgttggaggctcatcgttcctattcaggcagatgttatcgaggtccgacnnnnnnaaaaacctttccttctaaaaacaaaaccagatcggatacgcatgaggct

SEQ ID NO: 5369 - DNA, 146 bp, Artificial Sequence
  Bisulfite Padlock Probe
  misc_feature 93, 94, 95, 96, 97, 98: n = A,T,C or G
gactggaagagcactgttctaaccaacgctatttcaaaccctacgttggaggctcatcgttcctattcaggcagatgttatcgaggtccgacnnnnnnaaacccccgtacgaaaaactaaaaacacgatcggatacgcatgaggct

SEQ ID NO: 5370 - DNA, 146 bp, Artificial Sequence
  Bisulfite Padlock Probe
  misc_feature 93, 94, 95, 96, 97, 98: n = A,T,C or G
gactggaagagcactgttctaaccactataacccccacccccaagttggaggctcatcgttcctattcaggcagatgttatcgaggtccgacnnnnnnaaaacgaaaaactaacaaccctaaacccgatcggatacgcatgaggct

SEQ ID NO: 5371 - DNA, 146 bp, Artificial Sequence
  Bisulfite Padlock Probe
  misc_feature 93, 94, 95, 96, 97, 98: n = A,T,C or G
gactggaagagcactgttctaaccactataacccccacccccgagttggaggctcatcgttcctattcaggcagatgttatcgaggtccgacnnnnnnaaaacgaaaaactaacgaccctaaacccgatcggatacgcatgaggct

SEQ ID NO: 5372 - DNA, 146 bp, Artificial Sequence
  Bisulfite Padlock Probe
  misc_feature 94, 95, 96, 97, 98, 99: n = A,T,C or G
gactggaagagcactgttctaaccatttccctataacaaaaccacgttggaggctcatcgttcctattcaggcagatgttatcgaggtccgacnnnnnnccaaaactcgcacaaataaccaaaaacgatcggatacgcatgaggct

SEQ ID NO: 5373 - DNA, 146 bp, Artificial Sequence
  Bisulfite Padlock Probe
  misc_feature 94, 95, 96, 97, 98, 99: n = A,T,C or G
gactggaagagcactgttctaaccatttccctataacaaaaccacgttggaggctcatcgttcctattcaggcagatgttatcgaggtccgacnnnnnnccaaaactcgcacaaataaccgaaaacgatcggatacgcatgaggct

SEQ ID NO: 5374 - DNA, 146 bp, Artificial Sequence
  Bisulfite Padlock Probe
  misc_feature 93, 94, 95, 96, 97, 98: n = A,T,C or G
gactggaagagcactgttctaaccccaacgacccaaccaacaaagttggaggctcatcgttcctattcaggcagatgttatcgaggtccgacnnnnnnataaacgacctctaccacccgtacattcgatcggatacgcatgaggct

SEQ ID NO: 5375 - DNA, 146 bp, Artificial Sequence
  Bisulfite Padlock Probe
  misc_feature 93, 94, 95, 96, 97, 98: n = A,T,C or G
gactggaagagcactgttctaaccccaacgacccaaccaacgaagttggaggctcatcgttcctattcaggcagatgttatcgaggtccgacnnnnnnataaacgacctctaccacccgtacgttcgatcggatacgcatgaggct

SEQ ID NO: 5376 - DNA, 146 bp, Artificial Sequence
  Bisulfite Padlock Probe
  misc_feature 93, 94, 95, 96, 97, 98: n = A,T,C or G
gactggaagagcactgttctaaccctaacctaaccctatcaaacgttggaggctcatcgttcctattcaggcagatgttatcgaggtccgacnnnnnnaaaaacgaaaaacgccgcaacctaaaaagatcggatacgcatgaggct

SEQ ID NO: 5377 - DNA, 146 bp, Artificial Sequence
  Bisulfite Padlock Probe
  misc_feature 93, 94, 95, 96, 97, 98: n = A,T,C or G
gactggaagagcactgttctaaccctaacctaaccctatcgaacgttggaggctcatcgttcctattcaggcagatgttatcgaggtccgacnnnnnnaaaaacgaaaaacgccgcgacctaaaaagatcggatacgcatgaggct

SEQ ID NO: 5378 - DNA, 146 bp, Artificial Sequence
  Bisulfite Padlock Probe
  misc_feature 95, 96, 97, 98, 99, 100: n = A,T,C or G
gactggaagagcactgttctaaccctatcccgaacgcactacaaaagttggaggctcatcgttcctattcaggcagatgttatcgaggtccgacnnnnnnaacgaccctaaacctaacaaaaaatcgatcggatacgcatgaggct

SEQ ID NO: 5379 - DNA, 146 bp, Artificial Sequence
  Bisulfite Padlock Probe
  misc_feature 95, 96, 97, 98, 99, 100: n = A,T,C or G
gactggaagagcactgttctaaccctatcccgaacgcgctacaaaagttggaggctcatcgttcctattcaggcagatgttatcgaggtccgacnnnnnnaacgaccctaaacctaacgaaaaatcgatcggatacgcatgaggct

SEQ ID NO: 5380 - DNA, 146 bp, Artificial Sequence
  Bisulfite Padlock Probe
  misc_feature 93, 94, 95, 96, 97, 98: n = A,T,C or G
gactggaagagcactgttctaaccgaaaaccgaatcccaaaaaagttggaggctcatcgttcctattcaggcagatgttatcgaggtccgacnnnnnnaactactttacaaaaataaaaataaaaagatcggatacgcatgaggct

SEQ ID NO: 5381 - DNA, 146 bp, Artificial Sequence
  Bisulfite Padlock Probe
  misc_feature 93, 94, 95, 96, 97, 98: n = A,T,C or G
gactggaagagcactgttctaaccgaaaaccgaatcccgaaaaagttggaggctcatcgttcctattcaggcagatgttatcgaggtccgacnnnnnnaactactttacaaaaataaaaataaaaagatcggatacgcatgaggct

SEQ ID NO: 5382 - DNA, 146 bp, Artificial Sequence
  Bisulfite Padlock Probe
  misc_feature 93, 94, 95, 96, 97, 98: n = A,T,C or G
gactggaagagcactgttctaaccgcaacgcccaacaaaattccgttggaggctcatcgttcctattcaggcagatgttatcgaggtccgacnnnnnnaactaaatatccataacctaaaaacaccgatcggatacgcatgaggct

SEQ ID NO: 5383 - DNA, 146 bp, Artificial Sequence
  Bisulfite Padlock Probe
  misc_feature 93, 94, 95, 96, 97, 98: n = A,T,C or G
gactggaagagcactgttctaaccgcaacgcccaacgaaattccgttggaggctcatcgttcctattcaggcagatgttatcgaggtccgacnnnnnnaactaaatatccataacctaaaaacaccgatcggatacgcatgaggct

SEQ ID NO: 5384 - DNA, 146 bp, Artificial Sequence
  Bisulfite Padlock Probe
  misc_feature 96, 97, 98, 99, 100, 101: n = A,T,C or G
gactggaagagcactgttctaacgaacccaaaacccaactacaattcgttggaggctcatcgttcctattcaggcagatgttatcgaggtccgacnnnnnncgtcgcttcgaaaaataaacaacaagatcggatacgcatgaggct

SEQ ID NO: 5385 - DNA, 146 bp, Artificial Sequence
  Bisulfite Padlock Probe
  misc_feature 96, 97, 98, 99, 100, 101: n = A,T,C or G
gactggaagagcactgttctaacgactcctctatactacactaaactgttggaggctcatcgttcctattcaggcagatgttatcgaggtccgacnnnnnncctcccttccctcctcctactcctcgatcggatacgcatgaggct

SEQ ID NO: 5386 - DNA, 146 bp, Artificial Sequence
  Bisulfite Padlock Probe
  misc_feature 96, 97, 98, 99, 100, 101: n = A,T,C or G
gactggaagagcactgttctaacgactcctctatactacgctaaactgttggaggctcatcgttcctattcaggcagatgttatcgaggtccgacnnnnnncctcccttccctcctcctactcctcgatcggatacgcatgaggct

SEQ ID NO: 5387 - DNA, 146 bp, Artificial Sequence
  Bisulfite Padlock Probe
  misc_feature 93, 94, 95, 96, 97, 98: n = A,T,C or G
gactggaagagcactgttctaacgcaacaaaataaactaaatccgttggaggctcatcgttcctattcaggcagatgttatcgaggtccgacnnnnnncctttttcaaaccctccctacaacctccgatcggatacgcatgaggct

SEQ ID NO: 5388 - DNA, 146 bp, Artificial Sequence
  Bisulfite Padlock Probe
  misc_feature 93, 94, 95, 96, 97, 98: n = A,T,C or G
gactggaagagcactgttctaacgcaacgaaataaactaaatccgttggaggctcatcgttcctattcaggcagatgttatcgaggtccgacnnnnnncctttttcaaaccctccctacgacctccgatcggatacgcatgaggct

SEQ ID NO: 5389 - DNA, 146 bp, Artificial Sequence
  Bisulfite Padlock Probe
  misc_feature 92, 93, 94, 95, 96, 97: n = A,T,C or G
gactggaagagcactgttctaacgccaaaaccctaaaataaaagttggaggctcatcgttcctattcaggcagatgttatcgaggtccgacnnnnnnaaaatccccaacaatactcccaaactctcgatcggatacgcatgaggct

SEQ ID NO: 5390 - DNA, 146 bp, Artificial Sequence
  Bisulfite Padlock Probe
  misc_feature 92, 93, 94, 95, 96, 97: n = A,T,C or G
gactggaagagcactgttctaacgccctcaaaaacttaaaaccgttggaggctcatcgttcctattcaggcagatgttatcgaggtccgacnnnnnnctacccacaatacaccaaccctcctctatgatcggatacgcatgaggct

SEQ ID NO: 5391 - DNA, 146 bp, Artificial Sequence
  Bisulfite Padlock Probe
  misc_feature 92, 93, 94, 95, 96, 97: n = A,T,C or G
gactggaagagcactgttctaacgccctcgaaaacttaaaaccgttggaggctcatcgttcctattcaggcagatgttatcgaggtccgacnnnnnnctacccacaatacaccgaccctcctctatgatcggatacgcatgaggct

SEQ ID NO: 5392 - DNA, 146 bp, Artificial Sequence
  Bisulfite Padlock Probe
  misc_feature 92, 93, 94, 95, 96, 97: n = A,T,C or G
gactggaagagcactgttctaacgccgaaaccctaaaataaaagttggaggctcatcgttcctattcaggcagatgttatcgaggtccgacnnnnnnaaaatccccgacaatactcccaaactctcgatcggatacgcatgaggct

SEQ ID NO: 5393 - DNA, 146 bp, Artificial Sequence
  Bisulfite Padlock Probe
  misc_feature 93, 94, 95, 96, 97, 98: n = A,T,C or G
gactggaagagcactgttctaacgcctactcactaaaactacccgttggaggctcatcgttcctattcaggcagatgttatcgaggtccgacnnnnnnaaaaatctaaccgcgtcccgacaaaaaagatcggatacgcatgaggct

SEQ ID NO: 5394 - DNA, 146 bp, Artificial Sequence
  Bisulfite Padlock Probe
  misc_feature 93, 94, 95, 96, 97, 98: n = A,T,C or G
gactggaagagcactgttctaacgcctactcgctaaaactacccgttggaggctcatcgttcctattcaggcagatgttatcgaggtccgacnnnnnnaaaaatctaaccgcgtcccgacgaaaaagatcggatacgcatgaggct

SEQ ID NO: 5395 - DNA, 146 bp, Artificial Sequence
  Bisulfite Padlock Probe
  misc_feature 95, 96, 97, 98, 99, 100: n = A,T,C or G
gactggaagagcactgttctaacgctatacttctctaacaccctccgttggaggctcatcgttcctattcaggcagatgttatcgaggtccgacnnnnnnttaaaaaccaaaaaattaaaatatccgatcggatacgcatgaggct

SEQ ID NO: 5396 - DNA, 146 bp, Artificial Sequence
  Bisulfite Padlock Probe
  misc_feature 95, 96, 97, 98, 99, 100: n = A,T,C or G
gactggaagagcactgttctaacgctatacttctctaacgccctccgttggaggctcatcgttcctattcaggcagatgttatcgaggtccgacnnnnnnttaaaaaccgaaaaattaaaatatccgatcggatacgcatgaggct

SEQ ID NO: 5397 - DNA, 146 bp, Artificial Sequence
  Bisulfite Padlock Probe
  misc_feature 92, 93, 94, 95, 96, 97: n = A,T,C or G
gactggaagagcactgttctaactaactaactcaccactccacgttggaggctcatcgttcctattcaggcagatgttatcgaggtccgacnnnnnnaaacactctcacgtaccaaaaacaaaattgatcggatacgcatgaggct

SEQ ID NO: 5398 - DNA, 146 bp, Artificial Sequence
  Bisulfite Padlock Probe
  misc_feature 92, 93, 94, 95, 96, 97: n = A,T,C or G
gactggaagagcactgttctaactaactaactcaccactccacgttggaggctcatcgttcctattcaggcagatgttatcgaggtccgacnnnnnnaaacactctcacgtaccgaaaacaaaattgatcggatacgcatgaggct

SEQ ID NO: 5399 - DNA, 146 bp, Artificial Sequence
  Bisulfite Padlock Probe
  misc_feature 96, 97, 98, 99, 100, 101: n = A,T,C or G
gactggaagagcactgttctaactacaccgtaatcaccccctacaaagttggaggctcatcgttcctattcaggcagatgttatcgaggtccgacnnnnnntataactactaaaccccgcgcgccagatcggatacgcatgaggct

SEQ ID NO: 5400 - DNA, 146 bp, Artificial Sequence
  Bisulfite Padlock Probe
  misc_feature 96, 97, 98, 99, 100, 101: n = A,T,C or G
gactggaagagcactgttctaactacaccgtaatcgccccctacaaagttggaggctcatcgttcctattcaggcagatgttatcgaggtccgacnnnnnntataactactaaaccccgcgcgccggatcggatacgcatgaggct

SEQ ID NO: 5401 - DNA, 146 bp, Artificial Sequence
  Bisulfite Padlock Probe
  misc_feature 92, 93, 94, 95, 96, 97: n = A,T,C or G
gactggaagagcactgttctaactaccacctccaacccataccgttggaggctcatcgttcctattcaggcagatgttatcgaggtccgacnnnnnntttcgtaatcatcaatctcactctctcccgatcggatacgcatgaggct

SEQ ID NO: 5402 - DNA, 146 bp, Artificial Sequence
  Bisulfite Padlock Probe
  misc_feature 92, 93, 94, 95, 96, 97: n = A,T,C or G
gactggaagagcactgttctaactaccacctccaacccgtaccgttggaggctcatcgttcctattcaggcagatgttatcgaggtccgacnnnnnntttcgtaatcatcaatctcgctctctcccgatcggatacgcatgaggct

SEQ ID NO: 5403 - DNA, 146 bp, Artificial Sequence
  Bisulfite Padlock Probe
  misc_feature 93, 94, 95, 96, 97, 98: n = A,T,C or G
gactggaagagcactgttctaactacccacccccaccttcctaagttggaggctcatcgttcctattcaggcagatgttatcgaggtccgacnnnnnnacctctccctccaaaattccaaattaaagatcggatacgcatgaggct

SEQ ID NO: 5404 - DNA, 146 bp, Artificial Sequence
  Bisulfite Padlock Probe
  misc_feature 93, 94, 95, 96, 97, 98: n = A,T,C or G
gactggaagagcactgttctaactacccgcccccaccttcctaagttggaggctcatcgttcctattcaggcagatgttatcgaggtccgacnnnnnnacctctccctccaaaattccgaattaaagatcggatacgcatgaggct

SEQ ID NO: 5405 - DNA, 146 bp, Artificial Sequence
  Bisulfite Padlock Probe
  misc_feature 94, 95, 96, 97, 98, 99: n = A,T,C or G
gactggaagagcactgttctaactcaaaaacccaaataacaccacgttggaggctcatcgttcctattcaggcagatgttatcgaggtccgacnnnnnncaatcccgacctacaaaaaaccccctcgatcggatacgcatgaggct

SEQ ID NO: 5406 - DNA, 146 bp, Artificial Sequence
  Bisulfite Padlock Probe
  misc_feature 94, 95, 96, 97, 98, 99: n = A,T,C or G
gactggaagagcactgttctaactcaaaaacccaaataacaccgcgttggaggctcatcgttcctattcaggcagatgttatcgaggtccgacnnnnnncaatcccgacctacgaaaaaccccctcgatcggatacgcatgaggct

SEQ ID NO: 5407 - DNA, 146 bp, Artificial Sequence
  Bisulfite Padlock Probe
  misc_feature 92, 93, 94, 95, 96, 97: n = A,T,C or G
gactggaagagcactgttctaactcaacaaaacaaactaaaccgttggaggctcatcgttcctattcaggcagatgttatcgaggtccgacnnnnnncccaaatcctacttttctctcaccctaccgatcggatacgcatgaggct

SEQ ID NO: 5408 - DNA, 146 bp, Artificial Sequence
  Bisulfite Padlock Probe
  misc_feature 92, 93, 94, 95, 96, 97: n = A,T,C or G
gactggaagagcactgttctaactcacctacgcctcccaaaccgttggaggctcatcgttcctattcaggcagatgttatcgaggtccgacnnnnnnacatatctatacgacgttcaccccaaaaagatcggatacgcatgaggct

SEQ ID NO: 5409 - DNA, 146 bp, Artificial Sequence
  Bisulfite Padlock Probe
  misc_feature 92, 93, 94, 95, 96, 97: n = A,T,C or G
gactggaagagcactgttctaactcacctacgcctcccgaaccgttggaggctcatcgttcctattcaggcagatgttatcgaggtccgacnnnnnnacatatctatacgacgttcgccccaaaaagatcggatacgcatgaggct

SEQ ID NO: 5410 - DNA, 146 bp, Artificial Sequence
  Bisulfite Padlock Probe
  misc_feature 92, 93, 94, 95, 96, 97: n = A,T,C or G
gactggaagagcactgttctaactcgacaaaacaaactaaaccgttggaggctcatcgttcctattcaggcagatgttatcgaggtccgacnnnnnncccaaatcctacttttctctcgccctaccgatcggatacgcatgaggct

SEQ ID NO: 5411 - DNA, 146 bp, Artificial Sequence
  Bisulfite Padlock Probe
  misc_feature 94, 95, 96, 97, 98, 99: n = A,T,C or G
gactggaagagcactgttctaactctactcccccgcccaaaaatcgttggaggctcatcgttcctattcaggcagatgttatcgaggtccgacnnnnnnacgaacgaaaacgaaactcgcgaaacagatcggatacgcatgaggct

SEQ ID NO: 5412 - DNA, 146 bp, Artificial Sequence
  Bisulfite Padlock Probe
  misc_feature 94, 95, 96, 97, 98, 99: n = A,T,C or G
gactggaagagcactgttctaactctactcccccgcccgaaaatcgttggaggctcatcgttcctattcaggcagatgttatcgaggtccgacnnnnnnacgaacgaaaacgaaactcgcgaaacggatcggatacgcatgaggct

SEQ ID NO: 5413 - DNA, 146 bp, Artificial Sequence
  Bisulfite Padlock Probe
  misc_feature 96, 97, 98, 99, 100, 101: n = A,T,C or G
gactggaagagcactgttctaataaaaaccaaaataacaaaaactacgttggaggctcatcgttcctattcaggcagatgttatcgaggtccgacnnnnnnacccaaaactacaacaactactaccgatcggatacgcatgaggct

SEQ ID NO: 5414 - DNA, 146 bp, Artificial Sequence
  Bisulfite Padlock Probe
  misc_feature 96, 97, 98, 99, 100, 101: n = A,T,C or G
gactggaagagcactgttctaataaaaaccaaaataacgaaaactacgttggaggctcatcgttcctattcaggcagatgttatcgaggtccgacnnnnnnacccaaaactacgacaactactaccgatcggatacgcatgaggct

SEQ ID NO: 5415 - DNA, 146 bp, Artificial Sequence
  Bisulfite Padlock Probe
  misc_feature 92, 93, 94, 95, 96, 97: n = A,T,C or G
gactggaagagcactgttctaataaacaaacctttcccaaaaagttggaggctcatcgttcctattcaggcagatgttatcgaggtccgacnnnnnnaaactactcaaactccaaaatactaccccgatcggatacgcatgaggct

SEQ ID NO: 5416 - DNA, 146 bp, Artificial Sequence
  Bisulfite Padlock Probe
  misc_feature 92, 93, 94, 95, 96, 97: n = A,T,C or G
gactggaagagcactgttctaataaaccgcgactccaactcccgttggaggctcatcgttcctattcaggcagatgttatcgaggtccgacnnnnnnctaccaaacccgaatccgaaacacaaaaagatcggatacgcatgaggct

SEQ ID NO: 5417 - DNA, 146 bp, Artificial Sequence
  Bisulfite Padlock Probe
  misc_feature 92, 93, 94, 95, 96, 97: n = A,T,C or G
gactggaagagcactgttctaataaaccgcgactccgactcccgttggaggctcatcgttcctattcaggcagatgttatcgaggtccgacnnnnnnctaccaaacccgaatccgaaacacgaaaagatcggatacgcatgaggct

SEQ ID NO: 5418 - DNA, 146 bp, Artificial Sequence
  Bisulfite Padlock Probe
  misc_feature 92, 93, 94, 95, 96, 97: n = A,T,C or G
gactggaagagcactgttctaataaacgaacctttcccaaaaagttggaggctcatcgttcctattcaggcagatgttatcgaggtccgacnnnnnnaaactactcaaactccgaaatactaccccgatcggatacgcatgaggct

SEQ ID NO: 5419 - DNA, 146 bp, Artificial Sequence
  Bisulfite Padlock Probe
  misc_feature 92, 93, 94, 95, 96, 97: n = A,T,C or G
gactggaagagcactgttctaataacttaaccatacccaacaagttggaggctcatcgttcctattcaggcagatgttatcgaggtccgacnnnnnnacctaaatttccatatcaataacaaaacagatcggatacgcatgaggct

SEQ ID NO: 5420 - DNA, 146 bp, Artificial Sequence
  Bisulfite Padlock Probe
  misc_feature 92, 93, 94, 95, 96, 97: n = A,T,C or G
gactggaagagcactgttctaataacttaaccatacccaacaagttggaggctcatcgttcctattcaggcagatgttatcgaggtccgacnnnnnnacctaaatttccatatcaataacgaaacagatcggatacgcatgaggct

SEQ ID NO: 5421 - DNA, 146 bp, Artificial Sequence
  Bisulfite Padlock Probe
  misc_feature 96, 97, 98, 99, 100, 101: n = A,T,C or G
gactggaagagcactgttctaataataacaaaccgtacgcaccaaaagttggaggctcatcgttcctattcaggcagatgttatcgaggtccgacnnnnnncctaaacaatataccgccatccatcgatcggatacgcatgaggct

SEQ ID NO: 5422 - DNA, 146 bp, Artificial Sequence
  Bisulfite Padlock Probe
  misc_feature 96, 97, 98, 99, 100, 101: n = A,T,C or G
gactggaagagcactgttctaataataacaaaccgtacgcgccaaaagttggaggctcatcgttcctattcaggcagatgttatcgaggtccgacnnnnnncctaaacaatataccgccgtccatcgatcggatacgcatgaggct

SEQ ID NO: 5423 - DNA, 146 bp, Artificial Sequence
  Bisulfite Padlock Probe
  misc_feature 96, 97, 98, 99, 100, 101: n = A,T,C or G
gactggaagagcactgttctaatactaaacatcatactactcttctagttggaggctcatcgttcctattcaggcagatgttatcgaggtccgacnnnnnnaaatcccaaaaacctatacctacccgatcggatacgcatgaggct

SEQ ID NO: 5424 - DNA, 146 bp, Artificial Sequence
  Bisulfite Padlock Probe
  misc_feature 96, 97, 98, 99, 100, 101: n = A,T,C or G
gactggaagagcactgttctaatactaaacatcgtactactcttctagttggaggctcatcgttcctattcaggcagatgttatcgaggtccgacnnnnnnaaatcccaaaaacctatacctacccgatcggatacgcatgaggct

SEQ ID NO: 5425 - DNA, 146 bp, Artificial Sequence
  Bisulfite Padlock Probe
  misc_feature 96, 97, 98, 99, 100, 101: n = A,T,C or G
gactggaagagcactgttctaatataaaccgaccaaatccctcaactgttggaggctcatcgttcctattcaggcagatgttatcgaggtccgacnnnnnnaaccgctccccaaaacaactatcccgatcggatacgcatgaggct

SEQ ID NO: 5426 - DNA, 146 bp, Artificial Sequence
  Bisulfite Padlock Probe
  misc_feature 96, 97, 98, 99, 100, 101: n = A,T,C or G
gactggaagagcactgttctaatataaaccgaccgaatccctcaactgttggaggctcatcgttcctattcaggcagatgttatcgaggtccgacnnnnnnaaccgctccccgaaacaactatcccgatcggatacgcatgaggct

SEQ ID NO: 5427 - DNA, 146 bp, Artificial Sequence
  Bisulfite Padlock Probe
  misc_feature 94, 95, 96, 97, 98, 99: n = A,T,C or G
gactggaagagcactgttctaatccatttccttaaatattttatagttggaggctcatcgttcctattcaggcagatgttatcgaggtccgacnnnnnnaaatatacatatctaaaacaatcccaagatcggatacgcatgaggct

SEQ ID NO: 5428 - DNA, 146 bp, Artificial Sequence
  Bisulfite Padlock Probe
  misc_feature 94, 95, 96, 97, 98, 99: n = A,T,C or G
gactggaagagcactgttctaatccatttccttaaatattttatagttggaggctcatcgttcctattcaggcagatgttatcgaggtccgacnnnnnnaaatatacgtatctaaaacaatcccaagatcggatacgcatgaggct

SEQ ID NO: 5429 - DNA, 146 bp, Artificial Sequence
  Bisulfite Padlock Probe
  misc_feature 94, 95, 96, 97, 98, 99: n = A,T,C or G
gactggaagagcactgttctaatcccccaaactaatccctaaaaagttggaggctcatcgttcctattcaggcagatgttatcgaggtccgacnnnnnnaccgaactttaaaccatccttatctacgatcggatacgcatgaggct

SEQ ID NO: 5430 - DNA, 146 bp, Artificial Sequence
  Bisulfite Padlock Probe
  misc_feature 94, 95, 96, 97, 98, 99: n = A,T,C or G
gactggaagagcactgttctaatcccccgaactaatccctaaaaagttggaggctcatcgttcctattcaggcagatgttatcgaggtccgacnnnnnnaccgaactttaaaccgtccttatctacgatcggatacgcatgaggct

SEQ ID NO: 5431 - DNA, 146 bp, Artificial Sequence
  Bisulfite Padlock Probe
  misc_feature 95, 96, 97, 98, 99, 100: n = A,T,C or G
gactggaagagcactgttctaatcgcgaacaaacaccccctactaagttggaggctcatcgttcctattcaggcagatgttatcgaggtccgacnnnnnntttaaaattctaaaacaaactaaaaagatcggatacgcatgaggct

SEQ ID NO: 5432 - DNA, 146 bp, Artificial Sequence
  Bisulfite Padlock Probe
  misc_feature 95, 96, 97, 98, 99, 100: n = A,T,C or G
gactggaagagcactgttctaatcgcgaacaaacgccccctactaagttggaggctcatcgttcctattcaggcagatgttatcgaggtccgacnnnnnntttaaaattctaaaacgaactaaaaagatcggatacgcatgaggct

SEQ ID NO: 5433 - DNA, 146 bp, Artificial Sequence
  Bisulfite Padlock Probe
  misc_feature 93, 94, 95, 96, 97, 98: n = A,T,C or G
gactggaagagcactgttctaattaaactcgaatcaatacctccgttggaggctcatcgttcctattcaggcagatgttatcgaggtccgacnnnnnntcaacgaaatccaaaaactaaaaacaacgatcggatacgcatgaggct

SEQ ID NO: 5434 - DNA, 146 bp, Artificial Sequence
  Bisulfite Padlock Probe
  misc_feature 93, 94, 95, 96, 97, 98: n = A,T,C or G
gactggaagagcactgttctaattaaactcgaatcgatacctccgttggaggctcatcgttcctattcaggcagatgttatcgaggtccgacnnnnnntcaacgaaatccgaaaactaaaaacaacgatcggatacgcatgaggct

SEQ ID NO: 5435 - DNA, 146 bp, Artificial Sequence
  Bisulfite Padlock Probe
  misc_feature 95, 96, 97, 98, 99, 100: n = A,T,C or G
gactggaagagcactgttctacaaaacgaaatccccaaaatccctcgttggaggctcatcgttcctattcaggcagatgttatcgaggtccgacnnnnnnttccctatctctcctaaaaccttaaagatcggatacgcatgaggct

SEQ ID NO: 5436 - DNA, 146 bp, Artificial Sequence
  Bisulfite Padlock Probe
  misc_feature 95, 96, 97, 98, 99, 100: n = A,T,C or G
gactggaagagcactgttctacaaaacgaaatccccgaaatccctcgttggaggctcatcgttcctattcaggcagatgttatcgaggtccgacnnnnnnttccctatctctcctaaaaccttaaagatcggatacgcatgaggct

SEQ ID NO: 5437 - DNA, 146 bp, Artificial Sequence
  Bisulfite Padlock Probe
  misc_feature 94, 95, 96, 97, 98, 99: n = A,T,C or G
gactggaagagcactgttctacaaaccctaaactcccgaaaacacgttggaggctcatcgttcctattcaggcagatgttatcgaggtccgacnnnnnnctcttaaaacccccgacaacaccctaagatcggatacgcatgaggct

SEQ ID NO: 5438 - DNA, 146 bp, Artificial Sequence
  Bisulfite Padlock Probe
  misc_feature 94, 95, 96, 97, 98, 99: n = A,T,C or G
gactggaagagcactgttctacaaaccctaaactcccgaaaacgcgttggaggctcatcgttcctattcaggcagatgttatcgaggtccgacnnnnnnctcttaaaacccccgacaacgccctaagatcggatacgcatgaggct

SEQ ID NO: 5439 - DNA, 146 bp, Artificial Sequence
  Bisulfite Padlock Probe
  misc_feature 96, 97, 98, 99, 100, 101: n = A,T,C or G
gactggaagagcactgttctacaacacaaccactccatatccataccgttggaggctcatcgttcctattcaggcagatgttatcgaggtccgacnnnnnnaatacgcaccgccaacgaaaacaacgatcggatacgcatgaggct

SEQ ID NO: 5440 - DNA, 146 bp, Artificial Sequence
  Bisulfite Padlock Probe
  misc_feature 96, 97, 98, 99, 100, 101: n = A,T,C or G
gactggaagagcactgttctacaacacaaccgctccatatccataccgttggaggctcatcgttcctattcaggcagatgttatcgaggtccgacnnnnnnaatacgcaccgccaacgaaaacgacgatcggatacgcatgaggct

SEQ ID NO: 5441 - DNA, 146 bp, Artificial Sequence
  Bisulfite Padlock Probe
  misc_feature 95, 96, 97, 98, 99, 100: n = A,T,C or G
gactggaagagcactgttctacaacgtaccccatcccctcaaaaacgttggaggctcatcgttcctattcaggcagatgttatcgaggtccgacnnnnnnaacgacgccacctattccaacaaaaagatcggatacgcatgaggct

SEQ ID NO: 5442 - DNA, 146 bp, Artificial Sequence
  Bisulfite Padlock Probe
  misc_feature 95, 96, 97, 98, 99, 100: n = A,T,C or G
gactggaagagcactgttctacaacgtaccccatcccctcgaaaacgttggaggctcatcgttcctattcaggcagatgttatcgaggtccgacnnnnnnaacgacgccgcctattccaacaaaaagatcggatacgcatgaggct

SEQ ID NO: 5443 - DNA, 146 bp, Artificial Sequence
  Bisulfite Padlock Probe
  misc_feature 94, 95, 96, 97, 98, 99: n = A,T,C or G
gactggaagagcactgttctacaatataaaccgccgcgactcaacgttggaggctcatcgttcctattcaggcagatgttatcgaggtccgacnnnnnnaatataacgaaccgacgacgcgcataagatcggatacgcatgaggct

SEQ ID NO: 5444 - DNA, 146 bp, Artificial Sequence
  Bisulfite Padlock Probe
  misc_feature 94, 95, 96, 97, 98, 99: n = A,T,C or G
gactggaagagcactgttctacaatataaaccgccgcgactcgacgttggaggctcatcgttcctattcaggcagatgttatcgaggtccgacnnnnnnaatataacgaaccgacgacgcgcgtaagatcggatacgcatgaggct

SEQ ID NO: 5445 - DNA, 146 bp, Artificial Sequence
  Bisulfite Padlock Probe
  misc_feature 95, 96, 97, 98, 99, 100: n = A,T,C or G
gactggaagagcactgttctacacacctattccccaaaacccaaacgttggaggctcatcgttcctattcaggcagatgttatcgaggtccgacnnnnnnaatccccaacccaaaccaaaactaccgatcggatacgcatgaggct

SEQ ID NO: 5446 - DNA, 146 bp, Artificial Sequence
  Bisulfite Padlock Probe
  misc_feature 95, 96, 97, 98, 99, 100: n = A,T,C or G
gactggaagagcactgttctacaccaaacacttcccaattacttttgttggaggctcatcgttcctattcaggcagatgttatcgaggtccgacnnnnnnaaactaaaacatccaactcccttcccgatcggatacgcatgaggct

SEQ ID NO: 5447 - DNA, 146 bp, Artificial Sequence
  Bisulfite Padlock Probe
  misc_feature 92, 93, 94, 95, 96, 97: n = A,T,C or G
gactggaagagcactgttctacacgccctccacaacttaacccgttggaggctcatcgttcctattcaggcagatgttatcgaggtccgacnnnnnnacacacaaactataccacgcaaccttcacgatcggatacgcatgaggct

SEQ ID NO: 5448 - DNA, 146 bp, Artificial Sequence
  Bisulfite Padlock Probe
  misc_feature 92, 93, 94, 95, 96, 97: n = A,T,C or G
gactggaagagcactgttctacacgccctccacgacttaacccgttggaggctcatcgttcctattcaggcagatgttatcgaggtccgacnnnnnnacacacaaactataccacgcgaccttcacgatcggatacgcatgaggct

SEQ ID NO: 5449 - DNA, 146 bp, Artificial Sequence
  Bisulfite Padlock Probe
  misc_feature 92, 93, 94, 95, 96, 97: n = A,T,C or G
gactggaagagcactgttctacacgcgcacgtcaaaacaaaacgttggaggctcatcgttcctattcaggcagatgttatcgaggtccgacnnnnnnaacataaccgaaacaaaataataaacctagatcggatacgcatgaggct

SEQ ID NO: 5450 - DNA, 146 bp, Artificial Sequence
  Bisulfite Padlock Probe
  misc_feature 92, 93, 94, 95, 96, 97: n = A,T,C or G
gactggaagagcactgttctacacgcgcacgtcaaaacgaaacgttggaggctcatcgttcctattcaggcagatgttatcgaggtccgacnnnnnnaacataaccgaaacgaaataataaacctagatcggatacgcatgaggct

SEQ ID NO: 5451 - DNA, 146 bp, Artificial Sequence
  Bisulfite Padlock Probe
  misc_feature 96, 97, 98, 99, 100, 101: n = A,T,C or G
gactggaagagcactgttctacataacccgccaaaccttaactctccgttggaggctcatcgttcctattcaggcagatgttatcgaggtccgacnnnnnngacgacccgcaaaacgaaccaaaacgatcggatacgcatgaggct

SEQ ID NO: 5452 - DNA, 146 bp, Artificial Sequence
  Bisulfite Padlock Probe
  misc_feature 96, 97, 98, 99, 100, 101: n = A,T,C or G
gactggaagagcactgttctacataacccgccgaaccttaactctccgttggaggctcatcgttcctattcaggcagatgttatcgaggtccgacnnnnnngacgacccgcaaaacgaaccgaaacgatcggatacgcatgaggct

SEQ ID NO: 5453 - DNA, 146 bp, Artificial Sequence
  Bisulfite Padlock Probe
  misc_feature 94, 95, 96, 97, 98, 99: n = A,T,C or G
gactggaagagcactgttctacatatcatactataaatcaccaccgttggaggctcatcgttcctattcaggcagatgttatcgaggtccgacnnnnnnacaaaaccccgacatctccataatcccgatcggatacgcatgaggct

SEQ ID NO: 5454 - DNA, 146 bp, Artificial Sequence
  Bisulfite Padlock Probe
  misc_feature 94, 95, 96, 97, 98, 99: n = A,T,C or G
gactggaagagcactgttctaccaaacacctaaaccccaccttctgttggaggctcatcgttcctattcaggcagatgttatcgaggtccgacnnnnnncctcctaccaactctcctccaaaaaccgatcggatacgcatgaggct

SEQ ID NO: 5455 - DNA, 146 bp, Artificial Sequence
  Bisulfite Padlock Probe
  misc_feature 94, 95, 96, 97, 98, 99: n = A,T,C or G
gactggaagagcactgttctaccaaacacctaaaccccgccttctgttggaggctcatcgttcctattcaggcagatgttatcgaggtccgacnnnnnncctcctaccgactctcctccaaaaaccgatcggatacgcatgaggct

SEQ ID NO: 5456 - DNA, 146 bp, Artificial Sequence
  Bisulfite Padlock Probe
  misc_feature 92, 93, 94, 95, 96, 97: n = A,T,C or G
gactggaagagcactgttctaccaaaccctcttcaaataaaccgttggaggctcatcgttcctattcaggcagatgttatcgaggtccgacnnnnnnaaaaactccctttccaatactcccaaacagatcggatacgcatgaggct

SEQ ID NO: 5457 - DNA, 146 bp, Artificial Sequence
  Bisulfite Padlock Probe
  misc_feature 92, 93, 94, 95, 96, 97: n = A,T,C or G
gactggaagagcactgttctaccaaacgcccgcaaaaacactagttggaggctcatcgttcctattcaggcagatgttatcgaggtccgacnnnnnnctaaaaatcaacaaccccaaaaaataaccgatcggatacgcatgaggct

SEQ ID NO: 5458 - DNA, 146 bp, Artificial Sequence
  Bisulfite Padlock Probe
  misc_feature 92, 93, 94, 95, 96, 97: n = A,T,C or G
gactggaagagcactgttctaccaaacgcccgcgaaaacactagttggaggctcatcgttcctattcaggcagatgttatcgaggtccgacnnnnnnctaaaaatcaacaaccccgaaaaataaccgatcggatacgcatgaggct

SEQ ID NO: 5459 - DNA, 146 bp, Artificial Sequence
  Bisulfite Padlock Probe
  misc_feature 92, 93, 94, 95, 96, 97: n = A,T,C or G
gactggaagagcactgttctaccaacaaccaccccataccctagttggaggctcatcgttcctattcaggcagatgttatcgaggtccgacnnnnnntctaaaatctcctcactccttttcccatcgatcggatacgcatgaggct

SEQ ID NO: 5460 - DNA, 146 bp, Artificial Sequence
  Bisulfite Padlock Probe
  misc_feature 92, 93, 94, 95, 96, 97: n = A,T,C or G
gactggaagagcactgttctacccaaacttctaactacaccttgttggaggctcatcgttcctattcaggcagatgttatcgaggtccgacnnnnnnaactcccgaaaaataaatcaaccaaatttgatcggatacgcatgaggct

SEQ ID NO: 5461 - DNA, 146 bp, Artificial Sequence
  Bisulfite Padlock Probe
  misc_feature 92, 93, 94, 95, 96, 97: n = A,T,C or G
gactggaagagcactgttctacccaaacttctaactacaccttgttggaggctcatcgttcctattcaggcagatgttatcgaggtccgacnnnnnnaactcccgaaaaataaatcgaccaaatttgatcggatacgcatgaggct

SEQ ID NO: 5462 - DNA, 146 bp, Artificial Sequence
  Bisulfite Padlock Probe
  misc_feature 95, 96, 97, 98, 99, 100: n = A,T,C or G
gactggaagagcactgttctacccatatccttcaaaaccataatccgttggaggctcatcgttcctattcaggcagatgttatcgaggtccgacnnnnnnaaaacatactaaccaaaatactatccgatcggatacgcatgaggct

SEQ ID NO: 5463 - DNA, 146 bp, Artificial Sequence
  Bisulfite Padlock Probe
  misc_feature 95, 96, 97, 98, 99, 100: n = A,T,C or G
gactggaagagcactgttctaccccaaccaaataaatatcctacacgttggaggctcatcgttcctattcaggcagatgttatcgaggtccgacnnnnnnctccaacaactcctcctactaaacccgatcggatacgcatgaggct

SEQ ID NO: 5464 - DNA, 146 bp, Artificial Sequence
  Bisulfite Padlock Probe
  misc_feature 95, 96, 97, 98, 99, 100: n = A,T,C or G
gactggaagagcactgttctaccccactcgctaaacaactaaactcgttggaggctcatcgttcctattcaggcagatgttatcgaggtccgacnnnnnnactccaaaatacacaacaaccaaaacgatcggatacgcatgaggct

SEQ ID NO: 5465 - DNA, 146 bp, Artificial Sequence
  Bisulfite Padlock Probe
  misc_feature 95, 96, 97, 98, 99, 100: n = A,T,C or G
gactggaagagcactgttctaccccactcgctaaacgactaaactcgttggaggctcatcgttcctattcaggcagatgttatcgaggtccgacnnnnnnactccaaaatacacaacaaccgaaacgatcggatacgcatgaggct

SEQ ID NO: 5466 - DNA, 146 bp, Artificial Sequence
  Bisulfite Padlock Probe
  misc_feature 92, 93, 94, 95, 96, 97: n = A,T,C or G
gactggaagagcactgttctaccccgaaaacgacgaaaacaacgttggaggctcatcgttcctattcaggcagatgttatcgaggtccgacnnnnnnaaaaatcgaccaataaacacactttacctgatcggatacgcatgaggct

SEQ ID NO: 5467 - DNA, 146 bp, Artificial Sequence
  Bisulfite Padlock Probe
  misc_feature 92, 93, 94, 95, 96, 97: n = A,T,C or G
gactggaagagcactgttctaccccgaaaacgacgaaaacgacgttggaggctcatcgttcctattcaggcagatgttatcgaggtccgacnnnnnnaaaaatcgaccgataaacacactttacctgatcggatacgcatgaggct

SEQ ID NO: 5468 - DNA, 146 bp, Artificial Sequence
  Bisulfite Padlock Probe
  misc_feature 95, 96, 97, 98, 99, 100: n = A,T,C or G
gactggaagagcactgttctacccctaaccctacaacacaacaatagttggaggctcatcgttcctattcaggcagatgttatcgaggtccgacnnnnnnaaaacctacgacacttataacaattagatcggatacgcatgaggct

SEQ ID NO: 5469 - DNA, 146 bp, Artificial Sequence
  Bisulfite Padlock Probe
  misc_feature 95, 96, 97, 98, 99, 100: n = A,T,C or G
gactggaagagcactgttctacccctaaccctacaacacaacaatagttggaggctcatcgttcctattcaggcagatgttatcgaggtccgacnnnnnnaaaacctacgacacttataacgattagatcggatacgcatgaggct

SEQ ID NO: 5470 - DNA, 146 bp, Artificial Sequence
  Bisulfite Padlock Probe
  misc_feature 92, 93, 94, 95, 96, 97: n = A,T,C or G
gactggaagagcactgttctacccgaccaacctccaaaaacccgttggaggctcatcgttcctattcaggcagatgttatcgaggtccgacnnnnnntcctttttcttctatcctcccccaaactagatcggatacgcatgaggct

SEQ ID NO: 5471 - DNA, 146 bp, Artificial Sequence
  Bisulfite Padlock Probe
  misc_feature 92, 93, 94, 95, 96, 97: n = A,T,C or G
gactggaagagcactgttctacccgaccaacctccgaaaacccgttggaggctcatcgttcctattcaggcagatgttatcgaggtccgacnnnnnntcctttttcttctatcctcccccgaactagatcggatacgcatgaggct

SEQ ID NO: 5472 - DNA, 146 bp, Artificial Sequence
  Bisulfite Padlock Probe
  misc_feature 95, 96, 97, 98, 99, 100: n = A,T,C or G
gactggaagagcactgttctacccgtatccttcaaaaccataatccgttggaggctcatcgttcctattcaggcagatgttatcgaggtccgacnnnnnnaaaacatactaaccaaaatactatccgatcggatacgcatgaggct

SEQ ID NO: 5473 - DNA, 146 bp, Artificial Sequence
  Bisulfite Padlock Probe
  misc_feature 96, 97, 98, 99, 100, 101: n = A,T,C or G
gactggaagagcactgttctaccctaaacccaaaaccgtaaccatacgttggaggctcatcgttcctattcaggcagatgttatcgaggtccgacnnnnnncgacaataaccgcacccctttcaacgatcggatacgcatgaggct

SEQ ID NO: 5474 - DNA, 146 bp, Artificial Sequence
  Bisulfite Padlock Probe
  misc_feature 96, 97, 98, 99, 100, 101: n = A,T,C or G
gactggaagagcactgttctaccctaaacccaaaaccgtaaccgtacgttggaggctcatcgttcctattcaggcagatgttatcgaggtccgacnnnnnncgacaataaccgcgcccctttcaacgatcggatacgcatgaggct

SEQ ID NO: 5475 - DNA, 146 bp, Artificial Sequence
  Bisulfite Padlock Probe
  misc_feature 92, 93, 94, 95, 96, 97: n = A,T,C or G
gactggaagagcactgttctaccctaaactccgtaacacaaaagttggaggctcatcgttcctattcaggcagatgttatcgaggtccgacnnnnnnatttacttcctaaacctttttattataatgatcggatacgcatgaggct

SEQ ID NO: 5476 - DNA, 146 bp, Artificial Sequence
  Bisulfite Padlock Probe
  misc_feature 92, 93, 94, 95, 96, 97: n = A,T,C or G
gactggaagagcactgttctaccctaaactccgtaacgcaaaagttggaggctcatcgttcctattcaggcagatgttatcgaggtccgacnnnnnnatttacttcctaaacctttttattataatgatcggatacgcatgaggct

SEQ ID NO: 5477 - DNA, 146 bp, Artificial Sequence
  Bisulfite Padlock Probe
  misc_feature 94, 95, 96, 97, 98, 99: n = A,T,C or G
gactggaagagcactgttctaccctaataaaataatacattcctcgttggaggctcatcgttcctattcaggcagatgttatcgaggtccgacnnnnnnaaacctacccgcgaaccaaatcaaaacgatcggatacgcatgaggct

SEQ ID NO: 5478 - DNA, 146 bp, Artificial Sequence
  Bisulfite Padlock Probe
  misc_feature 94, 95, 96, 97, 98, 99: n = A,T,C or G
gactggaagagcactgttctaccctaataaaataatacattcctcgttggaggctcatcgttcctattcaggcagatgttatcgaggtccgacnnnnnnaaacctacccgcgaaccgaatcaaaacgatcggatacgcatgaggct

SEQ ID NO: 5479 - DNA, 146 bp, Artificial Sequence
  Bisulfite Padlock Probe
  misc_feature 92, 93, 94, 95, 96, 97: n = A,T,C or G
gactggaagagcactgttctaccctctcccaactcacaaacccgttggaggctcatcgttcctattcaggcagatgttatcgaggtccgacnnnnnntcctaataaattcatttcaaaaatacctcgatcggatacgcatgaggct

SEQ ID NO: 5480 - DNA, 146 bp, Artificial Sequence
  Bisulfite Padlock Probe
  misc_feature 92, 93, 94, 95, 96, 97: n = A,T,C or G
gactggaagagcactgttctaccctctcccaactcgcaaacccgttggaggctcatcgttcctattcaggcagatgttatcgaggtccgacnnnnnntcctaataaattcgtttcaaaaatacctcgatcggatacgcatgaggct

SEQ ID NO: 5481 - DNA, 146 bp, Artificial Sequence
  Bisulfite Padlock Probe
  misc_feature 94, 95, 96, 97, 98, 99: n = A,T,C or G
gactggaagagcactgttctaccgaaaaaccaacctataacacacgttggaggctcatcgttcctattcaggcagatgttatcgaggtccgacnnnnnntactactaacaacacaaactctaaaccgatcggatacgcatgaggct

SEQ ID NO: 5482 - DNA, 146 bp, Artificial Sequence
  Bisulfite Padlock Probe
  misc_feature 94, 95, 96, 97, 98, 99: n = A,T,C or G
gactggaagagcactgttctaccgaaaaaccaacctataacgcacgttggaggctcatcgttcctattcaggcagatgttatcgaggtccgacnnnnnntactactaacaacgcaaactctaaaccgatcggatacgcatgaggct

SEQ ID NO: 5483 - DNA, 146 bp, Artificial Sequence
  Bisulfite Padlock Probe
  misc_feature 96, 97, 98, 99, 100, 101: n = A,T,C or G
gactggaagagcactgttctaccgaaaaactaaacgcctcaaaaaccgttggaggctcatcgttcctattcaggcagatgttatcgaggtccgacnnnnnnaaacccactcctcccccaaaaaaccgatcggatacgcatgaggct

SEQ ID NO: 5484 - DNA, 146 bp, Artificial Sequence
  Bisulfite Padlock Probe
  misc_feature 96, 97, 98, 99, 100, 101: n = A,T,C or G
gactggaagagcactgttctaccgaaaaactaaacgcctcgaaaaccgttggaggctcatcgttcctattcaggcagatgttatcgaggtccgacnnnnnnaaacccactcctcccccgaaaaaccgatcggatacgcatgaggct

SEQ ID NO: 5485 - DNA, 146 bp, Artificial Sequence
  Bisulfite Padlock Probe
  misc_feature 92, 93, 94, 95, 96, 97: n = A,T,C or G
gactggaagagcactgttctaccgaaccctcttcaaataaaccgttggaggctcatcgttcctattcaggcagatgttatcgaggtccgacnnnnnnaaaaactccctttccaatactcccgaacagatcggatacgcatgaggct

SEQ ID NO: 5486 - DNA, 146 bp, Artificial Sequence
  Bisulfite Padlock Probe
  misc_feature 92, 93, 94, 95, 96, 97: n = A,T,C or G
gactggaagagcactgttctaccgacaaccaccccataccctagttggaggctcatcgttcctattcaggcagatgttatcgaggtccgacnnnnnntctaaaatctcctcgctccttttcccatcgatcggatacgcatgaggct

SEQ ID NO: 5487 - DNA, 146 bp, Artificial Sequence
  Bisulfite Padlock Probe
  misc_feature 92, 93, 94, 95, 96, 97: n = A,T,C or G
gactggaagagcactgttctaccgaccgaaacgaaaaacaaacgttggaggctcatcgttcctattcaggcagatgttatcgaggtccgacnnnnnnacaataataaatataacaactataacaaagatcggatacgcatgaggct

SEQ ID NO: 5488 - DNA, 146 bp, Artificial Sequence
  Bisulfite Padlock Probe
  misc_feature 92, 93, 94, 95, 96, 97: n = A,T,C or G
gactggaagagcactgttctaccgaccgaaacgaaaaacgaacgttggaggctcatcgttcctattcaggcagatgttatcgaggtccgacnnnnnnacaataataaatataacaactataacaaagatcggatacgcatgaggct

SEQ ID NO: 5489 - DNA, 146 bp, Artificial Sequence
  Bisulfite Padlock Probe
  misc_feature 92, 93, 94, 95, 96, 97: n = A,T,C or G
gactggaagagcactgttctaccgacgcaaaccaaactcctccgttggaggctcatcgttcctattcaggcagatgttatcgaggtccgacnnnnnncaactcctcgacatcaaaactcaacaaacgatcggatacgcatgaggct

SEQ ID NO: 5490 - DNA, 146 bp, Artificial Sequence
  Bisulfite Padlock Probe
  misc_feature 92, 93, 94, 95, 96, 97: n = A,T,C or G
gactggaagagcactgttctaccgacgcaaaccgaactcctccgttggaggctcatcgttcctattcaggcagatgttatcgaggtccgacnnnnnncaactcctcgacgtcaaaactcaacaaacgatcggatacgcatgaggct

SEQ ID NO: 5491 - DNA, 146 bp, Artificial Sequence
  Bisulfite Padlock Probe
  misc_feature 96, 97, 98, 99, 100, 101: n = A,T,C or G
gactggaagagcactgttctaccgcaccacacacatcaattattcatgttggaggctcatcgttcctattcaggcagatgttatcgaggtccgacnnnnnnttcaaccaacgccaaacaaaaactagatcggatacgcatgaggct

SEQ ID NO: 5492 - DNA, 146 bp, Artificial Sequence
  Bisulfite Padlock Probe
  misc_feature 96, 97, 98, 99, 100, 101: n = A,T,C or G
gactggaagagcactgttctaccgcaccgcacacatcaattattcatgttggaggctcatcgttcctattcaggcagatgttatcgaggtccgacnnnnnnttcaaccaacgccgaacaaaaactagatcggatacgcatgaggct

SEQ ID NO: 5493 - DNA, 146 bp, Artificial Sequence
  Bisulfite Padlock Probe
  misc_feature 92, 93, 94, 95, 96, 97: n = A,T,C or G
gactggaagagcactgttctacctaaaatttcgcgcctcgcacgttggaggctcatcgttcctattcaggcagatgttatcgaggtccgacnnnnnnttttctttccttaacaaacttcttataacgatcggatacgcatgaggct

SEQ ID NO: 5494 - DNA, 146 bp, Artificial Sequence
  Bisulfite Padlock Probe
  misc_feature 92, 93, 94, 95, 96, 97: n = A,T,C or G
gactggaagagcactgttctacctaaaatttcgcgcctcgcgcgttggaggctcatcgttcctattcaggcagatgttatcgaggtccgacnnnnnnttttctttccttaacaaacttcttataacgatcggatacgcatgaggct

SEQ ID NO: 5495 - DNA, 146 bp, Artificial Sequence
  Bisulfite Padlock Probe
  misc_feature 95, 96, 97, 98, 99, 100: n = A,T,C or G
gactggaagagcactgttctacctaaacaacaaactctacaaccccgttggaggctcatcgttcctattcaggcagatgttatcgaggtccgacnnnnnncaacgtcgcgataaccctacaactacgatcggatacgcatgaggct

SEQ ID NO: 5496 - DNA, 146 bp, Artificial Sequence
  Bisulfite Padlock Probe
  misc_feature 95, 96, 97, 98, 99, 100: n = A,T,C or G
gactggaagagcactgttctacctaaacaacgaactctacaaccccgttggaggctcatcgttcctattcaggcagatgttatcgaggtccgacnnnnnncaacgtcgcgataaccctacgactacgatcggatacgcatgaggct

SEQ ID NO: 5497 - DNA, 146 bp, Artificial Sequence
  Bisulfite Padlock Probe
  misc_feature 96, 97, 98, 99, 100, 101: n = A,T,C or G
gactggaagagcactgttctacctaccatacctattctacccactccgttggaggctcatcgttcctattcaggcagatgttatcgaggtccgacnnnnnncgcccaaactctacttcaaccccaagatcggatacgcatgaggct

SEQ ID NO: 5498 - DNA, 146 bp, Artificial Sequence
  Bisulfite Padlock Probe
  misc_feature 96, 97, 98, 99, 100, 101: n = A,T,C or G
gactggaagagcactgttctacctaccgtacctattctacccactccgttggaggctcatcgttcctattcaggcagatgttatcgaggtccgacnnnnnncgcccgaactctacttcaaccccaagatcggatacgcatgaggct

SEQ ID NO: 5499 - DNA, 146 bp, Artificial Sequence
  Bisulfite Padlock Probe
  misc_feature 94, 95, 96, 97, 98, 99: n = A,T,C or G
gactggaagagcactgttctacctcaaaaaccccaatttcaaccagttggaggctcatcgttcctattcaggcagatgttatcgaggtccgacnnnnnnctatcgaccaacaacgaacactcctccgatcggatacgcatgaggct

SEQ ID NO: 5500 - DNA, 146 bp, Artificial Sequence
  Bisulfite Padlock Probe
  misc_feature 93, 94, 95, 96, 97, 98: n = A,T,C or G
gactggaagagcactgttctacctcaaatctaaataattattccgttggaggctcatcgttcctattcaggcagatgttatcgaggtccgacnnnnnnaaaaactcaaactacgaccaataccaccgatcggatacgcatgaggct

SEQ ID NO: 5501 - DNA, 146 bp, Artificial Sequence
  Bisulfite Padlock Probe
  misc_feature 93, 94, 95, 96, 97, 98: n = A,T,C or G
gactggaagagcactgttctacctcaaatctaaataattattccgttggaggctcatcgttcctattcaggcagatgttatcgaggtccgacnnnnnnaaaaactcaaactacgaccgataccaccgatcggatacgcatgaggct

SEQ ID NO: 5502 - DNA, 146 bp, Artificial Sequence
  Bisulfite Padlock Probe
  misc_feature 92, 93, 94, 95, 96, 97: n = A,T,C or G
gactggaagagcactgttctacctccctccccctaatactcccgttggaggctcatcgttcctattcaggcagatgttatcgaggtccgacnnnnnnaaaaacaaaaccaaacaaaataaataaaagatcggatacgcatgaggct

SEQ ID NO: 5503 - DNA, 146 bp, Artificial Sequence
  Bisulfite Padlock Probe
  misc_feature 94, 95, 96, 97, 98, 99: n = A,T,C or G
gactggaagagcactgttctacctcgaaaaccccaatttcaaccagttggaggctcatcgttcctattcaggcagatgttatcgaggtccgacnnnnnnctatcgaccaacaacgaacgctcctccgatcggatacgcatgaggct

SEQ ID NO: 5504 - DNA, 146 bp, Artificial Sequence
  Bisulfite Padlock Probe
  misc_feature 95, 96, 97, 98, 99, 100: n = A,T,C or G
gactggaagagcactgttctacctcgacttacgcatcctactcaacgttggaggctcatcgttcctattcaggcagatgttatcgaggtccgacnnnnnnaaacgcccaataacctcctcaaaaacgatcggatacgcatgaggct

SEQ ID NO: 5505 - DNA, 146 bp, Artificial Sequence
  Bisulfite Padlock Probe
  misc_feature 95, 96, 97, 98, 99, 100: n = A,T,C or G
gactggaagagcactgttctacctcgacttacgcgtcctactcaacgttggaggctcatcgttcctattcaggcagatgttatcgaggtccgacnnnnnnaaacgcccgataacctcctcaaaaacgatcggatacgcatgaggct

SEQ ID NO: 5506 - DNA, 146 bp, Artificial Sequence
  Bisulfite Padlock Probe
  misc_feature 92, 93, 94, 95, 96, 97: n = A,T,C or G
gactggaagagcactgttctaccttcccgtctcccaccaaaaagttggaggctcatcgttcctattcaggcagatgttatcgaggtccgacnnnnnnaactcccctcaatctcctttccattaaccgatcggatacgcatgaggct

SEQ ID NO: 5507 - DNA, 146 bp, Artificial Sequence
  Bisulfite Padlock Probe
  misc_feature 92, 93, 94, 95, 96, 97: n = A,T,C or G
gactggaagagcactgttctaccttcccgtctcccgccaaaaagttggaggctcatcgttcctattcaggcagatgttatcgaggtccgacnnnnnnaactcccctcaatctcctttccattaaccgatcggatacgcatgaggct

SEQ ID NO: 5508 - DNA, 146 bp, Artificial Sequence
  Bisulfite Padlock Probe
  misc_feature 92, 93, 94, 95, 96, 97: n = A,T,C or G
gactggaagagcactgttctacgaaaacccaaccccgaacatagttggaggctcatcgttcctattcaggcagatgttatcgaggtccgacnnnnnntcccgcaaacgaaatcttctacataaaccgatcggatacgcatgaggct

SEQ ID NO: 5509 - DNA, 146 bp, Artificial Sequence
  Bisulfite Padlock Probe
  misc_feature 92, 93, 94, 95, 96, 97: n = A,T,C or G
gactggaagagcactgttctacgaaaacccaaccccgaacgtagttggaggctcatcgttcctattcaggcagatgttatcgaggtccgacnnnnnntcccgcaaacgaaatcttctacgtaaaccgatcggatacgcatgaggct

SEQ ID NO: 5510 - DNA, 146 bp, Artificial Sequence
  Bisulfite Padlock Probe
  misc_feature 95, 96, 97, 98, 99, 100: n = A,T,C or G
gactggaagagcactgttctacgaaacaaaacgtcctacacaaaaagttggaggctcatcgttcctattcaggcagatgttatcgaggtccgacnnnnnnctaactccaacaactccaacaaactagatcggatacgcatgaggct

SEQ ID NO: 5511 - DNA, 146 bp, Artificial Sequence
  Bisulfite Padlock Probe
  misc_feature 95, 96, 97, 98, 99, 100: n = A,T,C or G
gactggaagagcactgttctacgaaacaaaacgtcctacgcaaaaagttggaggctcatcgttcctattcaggcagatgttatcgaggtccgacnnnnnnctaactccaacaactccaacaaactagatcggatacgcatgaggct

SEQ ID NO: 5512 - DNA, 146 bp, Artificial Sequence
  Bisulfite Padlock Probe
  misc_feature 96, 97, 98, 99, 100, 101: n = A,T,C or G
gactggaagagcactgttctacgaaaccaaaaaactatccttcttcagttggaggctcatcgttcctattcaggcagatgttatcgaggtccgacnnnnnnttcctaaacgcctacctaaccgcaagatcggatacgcatgaggct

SEQ ID NO: 5513 - DNA, 146 bp, Artificial Sequence
  Bisulfite Padlock Probe
  misc_feature 94, 95, 96, 97, 98, 99: n = A,T,C or G
gactggaagagcactgttctacgaaacccgacatctaaaactaacgttggaggctcatcgttcctattcaggcagatgttatcgaggtccgacnnnnnnctcaaaatacgcacaaccaaccctaacgatcggatacgcatgaggct

SEQ ID NO: 5514 - DNA, 146 bp, Artificial Sequence
  Bisulfite Padlock Probe
  misc_feature 94, 95, 96, 97, 98, 99: n = A,T,C or G
gactggaagagcactgttctacgaaacccgacgtctaaaactaacgttggaggctcatcgttcctattcaggcagatgttatcgaggtccgacnnnnnnctcaaaatacgcgcaaccaaccctaacgatcggatacgcatgaggct

SEQ ID NO: 5515 - DNA, 146 bp, Artificial Sequence
  Bisulfite Padlock Probe
  misc_feature 96, 97, 98, 99, 100, 101: n = A,T,C or G
gactggaagagcactgttctacgaaaccgaaaaactatccttcttcagttggaggctcatcgttcctattcaggcagatgttatcgaggtccgacnnnnnnttcctaaacgcctacctaaccgcgagatcggatacgcatgaggct

SEQ ID NO: 5516 - DNA, 146 bp, Artificial Sequence
  Bisulfite Padlock Probe
  misc_feature 92, 93, 94, 95, 96, 97: n = A,T,C or G
gactggaagagcactgttctacgaacccgaaacgaccgacaacgttggaggctcatcgttcctattcaggcagatgttatcgaggtccgacnnnnnnctaataatccacgcacaattcctcaaaaagatcggatacgcatgaggct

SEQ ID NO: 5517 - DNA, 146 bp, Artificial Sequence
  Bisulfite Padlock Probe
  misc_feature 92, 93, 94, 95, 96, 97: n = A,T,C or G
gactggaagagcactgttctacgaacccgaaacgaccgacgacgttggaggctcatcgttcctattcaggcagatgttatcgaggtccgacnnnnnnctaataatccacgcgcaattcctcaaaaagatcggatacgcatgaggct

SEQ ID NO: 5518 - DNA, 146 bp, Artificial Sequence
  Bisulfite Padlock Probe
  misc_feature 95, 96, 97, 98, 99, 100: n = A,T,C or G
gactggaagagcactgttctacgaacctcccccactacctctaaaagttggaggctcatcgttcctattcaggcagatgttatcgaggtccgacnnnnnnaaaaataaaacaacgccaacaaccccgatcggatacgcatgaggct

SEQ ID NO: 5519 - DNA, 146 bp, Artificial Sequence
  Bisulfite Padlock Probe
  misc_feature 95, 96, 97, 98, 99, 100: n = A,T,C or G
gactggaagagcactgttctacgaacctcccccgctacctctaaaagttggaggctcatcgttcctattcaggcagatgttatcgaggtccgacnnnnnnaaaaataaaacaacgccgacaaccccgatcggatacgcatgaggct

SEQ ID NO: 5520 - DNA, 146 bp, Artificial Sequence
  Bisulfite Padlock Probe
  misc_feature 95, 96, 97, 98, 99, 100: n = A,T,C or G
gactggaagagcactgttctacgcacctattccccaaaacccaaacgttggaggctcatcgttcctattcaggcagatgttatcgaggtccgacnnnnnnaatccccaacccaaaccgaaactaccgatcggatacgcatgaggct

SEQ ID NO: 5521 - DNA, 146 bp, Artificial Sequence
  Bisulfite Padlock Probe
  misc_feature 93, 94, 95, 96, 97, 98: n = A,T,C or G
gactggaagagcactgttctacgccgacacccatactcctaaacgttggaggctcatcgttcctattcaggcagatgttatcgaggtccgacnnnnnnccactacctacgacataacccaaaactcgatcggatacgcatgaggct

SEQ ID NO: 5522 - DNA, 146 bp, Artificial Sequence
  Bisulfite Padlock Probe
  misc_feature 93, 94, 95, 96, 97, 98: n = A,T,C or G
gactggaagagcactgttctacgccgacgcccatactcctaaacgttggaggctcatcgttcctattcaggcagatgttatcgaggtccgacnnnnnnccactacctacgacataacccgaaactcgatcggatacgcatgaggct

SEQ ID NO: 5523 - DNA, 146 bp, Artificial Sequence
  Bisulfite Padlock Probe
  misc_feature 93, 94, 95, 96, 97, 98: n = A,T,C or G
gactggaagagcactgttctacgcgcgaaatacgcgtcaaatacgttggaggctcatcgttcctattcaggcagatgttatcgaggtccgacnnnnnngaaaccctaacacgtcactaccaccatcgatcggatacgcatgaggct

SEQ ID NO: 5524 - DNA, 146 bp, Artificial Sequence
  Bisulfite Padlock Probe
  misc_feature 93, 94, 95, 96, 97, 98: n = A,T,C or G
gactggaagagcactgttctacgcgcgaaatacgcgtcgaatacgttggaggctcatcgttcctattcaggcagatgttatcgaggtccgacnnnnnngaaaccctaacacgtcgctaccaccatcgatcggatacgcatgaggct

SEQ ID NO: 5525 - DNA, 146 bp, Artificial Sequence
  Bisulfite Padlock Probe
  misc_feature 94, 95, 96, 97, 98, 99: n = A,T,C or G
gactggaagagcactgttctacgtatcatactataaatcaccaccgttggaggctcatcgttcctattcaggcagatgttatcgaggtccgacnnnnnnacaaaaccccgacatctccgtaatcccgatcggatacgcatgaggct

SEQ ID NO: 5526 - DNA, 146 bp, Artificial Sequence
  Bisulfite Padlock Probe
  misc_feature 96, 97, 98, 99, 100, 101: n = A,T,C or G
gactggaagagcactgttctactaaaacgacaccgacaacacctaacgttggaggctcatcgttcctattcaggcagatgttatcgaggtccgacnnnnnnacctccgaacaaaaaaccataaccagatcggatacgcatgaggct

SEQ ID NO: 5527 - DNA, 146 bp, Artificial Sequence
  Bisulfite Padlock Probe
  misc_feature 96, 97, 98, 99, 100, 101: n = A,T,C or G
gactggaagagcactgttctactaaaacgacaccgacgacacctaacgttggaggctcatcgttcctattcaggcagatgttatcgaggtccgacnnnnnnacctccgaacgaaaaaccataaccagatcggatacgcatgaggct

SEQ ID NO: 5528 - DNA, 146 bp, Artificial Sequence
  Bisulfite Padlock Probe
  misc_feature 96, 97, 98, 99, 100, 101: n = A,T,C or G
gactggaagagcactgttctactaaaccgaccactactaaacctaaagttggaggctcatcgttcctattcaggcagatgttatcgaggtccgacnnnnnntcaacgcgctaaccaacctaaacccgatcggatacgcatgaggct

SEQ ID NO: 5529 - DNA, 146 bp, Artificial Sequence
  Bisulfite Padlock Probe
  misc_feature 96, 97, 98, 99, 100, 101: n = A,T,C or G
gactggaagagcactgttctactaaaccgaccgctactaaacctaaagttggaggctcatcgttcctattcaggcagatgttatcgaggtccgacnnnnnntcaacgcgctaaccgacctaaacccgatcggatacgcatgaggct

SEQ ID NO: 5530 - DNA, 146 bp, Artificial Sequence
  Bisulfite Padlock Probe
  misc_feature 95, 96, 97, 98, 99, 100: n = A,T,C or G
gactggaagagcactgttctactaataaacgaatctccaaacccccgttggaggctcatcgttcctattcaggcagatgttatcgaggtccgacnnnnnnaacatcctaaccacctacaaactacagatcggatacgcatgaggct

SEQ ID NO: 5531 - DNA, 146 bp, Artificial Sequence
  Bisulfite Padlock Probe
  misc_feature 95, 96, 97, 98, 99, 100: n = A,T,C or G
gactggaagagcactgttctactaataaacgaatctccgaacccccgttggaggctcatcgttcctattcaggcagatgttatcgaggtccgacnnnnnnaacatcctaaccgcctacaaactacagatcggatacgcatgaggct

SEQ ID NO: 5532 - DNA, 146 bp, Artificial Sequence
  Bisulfite Padlock Probe
  misc_feature 94, 95, 96, 97, 98, 99: n = A,T,C or G
gactggaagagcactgttctactaatcgctcccgaacacaacaacgttggaggctcatcgttcctattcaggcagatgttatcgaggtccgacnnnnnnctacacaacgctacgtcgcacaaaaacgatcggatacgcatgaggct

SEQ ID NO: 5533 - DNA, 146 bp, Artificial Sequence
  Bisulfite Padlock Probe
  misc_feature 94, 95, 96, 97, 98, 99: n = A,T,C or G
gactggaagagcactgttctactaatcgctcccgaacgcaacaacgttggaggctcatcgttcctattcaggcagatgttatcgaggtccgacnnnnnnctacacaacgctacgtcgcacgaaaacgatcggatacgcatgaggct

SEQ ID NO: 5534 - DNA, 146 bp, Artificial Sequence
  Bisulfite Padlock Probe
  misc_feature 95, 96, 97, 98, 99, 100: n = A,T,C or G
gactggaagagcactgttctactacacccaaacgtccataataaccgttggaggctcatcgttcctattcaggcagatgttatcgaggtccgacnnnnnnctcaacccaacacctattcctccaacgatcggatacgcatgaggct

SEQ ID NO: 5535 - DNA, 146 bp, Artificial Sequence
  Bisulfite Padlock Probe
  misc_feature 95, 96, 97, 98, 99, 100: n = A,T,C or G
gactggaagagcactgttctactacacccaaacgtccgtaataaccgttggaggctcatcgttcctattcaggcagatgttatcgaggtccgacnnnnnnctcaacccgacacctattcctccaacgatcggatacgcatgaggct

SEQ ID NO: 5536 - DNA, 146 bp, Artificial Sequence
  Bisulfite Padlock Probe
  misc_feature 94, 95, 96, 97, 98, 99: n = A,T,C or G
gactggaagagcactgttctactacccaccgacgccaataaaatcgttggaggctcatcgttcctattcaggcagatgttatcgaggtccgacnnnnnntacccgcccaacaacctaacactaaaagatcggatacgcatgaggct

SEQ ID NO: 5537 - DNA, 146 bp, Artificial Sequence
  Bisulfite Padlock Probe
  misc_feature 94, 95, 96, 97, 98, 99: n = A,T,C or G
gactggaagagcactgttctactacccaccgacgccgataaaatcgttggaggctcatcgttcctattcaggcagatgttatcgaggtccgacnnnnnntacccgcccaacaacctaacgctaaaagatcggatacgcatgaggct

SEQ ID NO: 5538 - DNA, 146 bp, Artificial Sequence
  Bisulfite Padlock Probe
  misc_feature 92, 93, 94, 95, 96, 97: n = A,T,C or G
gactggaagagcactgttctactacctcactatccataaacacgttggaggctcatcgttcctattcaggcagatgttatcgaggtccgacnnnnnnatcctacaccctaaatcctacaccctaaagatcggatacgcatgaggct

SEQ ID NO: 5539 - DNA, 146 bp, Artificial Sequence
  Bisulfite Padlock Probe
  misc_feature 92, 93, 94, 95, 96, 97: n = A,T,C or G
gactggaagagcactgttctactacctcactatccataaacacgttggaggctcatcgttcctattcaggcagatgttatcgaggtccgacnnnnnngtcctacaccctaaatcctacaccctaaagatcggatacgcatgaggct

SEQ ID NO: 5540 - DNA, 146 bp, Artificial Sequence
  Bisulfite Padlock Probe
  misc_feature 96, 97, 98, 99, 100, 101: n = A,T,C or G
gactggaagagcactgttctactactaatactcttctatataacactgttggaggctcatcgttcctattcaggcagatgttatcgaggtccgacnnnnnnctacccaccacacctaaccgcaaacgatcggatacgcatgaggct

SEQ ID NO: 5541 - DNA, 146 bp, Artificial Sequence
  Bisulfite Padlock Probe
  misc_feature 96, 97, 98, 99, 100, 101: n = A,T,C or G
gactggaagagcactgttctactactaatactcttctatataacactgttggaggctcatcgttcctattcaggcagatgttatcgaggtccgacnnnnnnctacccaccacacctaaccgcgaacgatcggatacgcatgaggct

SEQ ID NO: 5542 - DNA, 146 bp, Artificial Sequence
  Bisulfite Padlock Probe
  misc_feature 96, 97, 98, 99, 100, 101: n = A,T,C or G
gactggaagagcactgttctactactcctaaaaacactacaaaacctgttggaggctcatcgttcctattcaggcagatgttatcgaggtccgacnnnnnnaaaatcctacgcccctacacaacccgatcggatacgcatgaggct

SEQ ID NO: 5543 - DNA, 146 bp, Artificial Sequence
  Bisulfite Padlock Probe
  misc_feature 96, 97, 98, 99, 100, 101: n = A,T,C or G
gactggaagagcactgttctactactcctaaaaacgctacaaaacctgttggaggctcatcgttcctattcaggcagatgttatcgaggtccgacnnnnnnaaaatcctacgcccctacacgacccgatcggatacgcatgaggct

SEQ ID NO: 5544 - DNA, 146 bp, Artificial Sequence
  Bisulfite Padlock Probe
  misc_feature 93, 94, 95, 96, 97, 98: n = A,T,C or G
gactggaagagcactgttctactatccacacctctaaaaacaaagttggaggctcatcgttcctattcaggcagatgttatcgaggtccgacnnnnnnaatcacaaataaaacaattccaaccttcgatcggatacgcatgaggct

SEQ ID NO: 5545 - DNA, 146 bp, Artificial Sequence
  Bisulfite Padlock Probe
  misc_feature 93, 94, 95, 96, 97, 98: n = A,T,C or G
gactggaagagcactgttctactatccacacctctaaaaacaaagttggaggctcatcgttcctattcaggcagatgttatcgaggtccgacnnnnnnaatcacaaataaaacgattccaaccttcgatcggatacgcatgaggct

SEQ ID NO: 5546 - DNA, 146 bp, Artificial Sequence
  Bisulfite Padlock Probe
  misc_feature 93, 94, 95, 96, 97, 98: n = A,T,C or G
gactggaagagcactgttctactattaaccaaaaacaaacccacgttggaggctcatcgttcctattcaggcagatgttatcgaggtccgacnnnnnntcataccctcaaacttaataaacaaattgatcggatacgcatgaggct

SEQ ID NO: 5547 - DNA, 146 bp, Artificial Sequence
  Bisulfite Padlock Probe
  misc_feature 93, 94, 95, 96, 97, 98: n = A,T,C or G
gactggaagagcactgttctactattaaccaaaaacaaacccgcgttggaggctcatcgttcctattcaggcagatgttatcgaggtccgacnnnnnntcataccctcgaacttaataaacaaattgatcggatacgcatgaggct

SEQ ID NO: 5548 - DNA, 146 bp, Artificial Sequence
  Bisulfite Padlock Probe
  misc_feature 96, 97, 98, 99, 100, 101: n = A,T,C or G
gactggaagagcactgttctactcactctctcttaacaaaaacaaccgttggaggctcatcgttcctattcaggcagatgttatcgaggtccgacnnnnnnaaaaacttcgcgcccaaaaataaacgatcggatacgcatgaggct

SEQ ID NO: 5549 - DNA, 146 bp, Artificial Sequence
  Bisulfite Padlock Probe
  misc_feature 96, 97, 98, 99, 100, 101: n = A,T,C or G
gactggaagagcactgttctactcgctctctcttaacaaaaacaaccgttggaggctcatcgttcctattcaggcagatgttatcgaggtccgacnnnnnnaaaaacttcgcgcccgaaaataaacgatcggatacgcatgaggct

SEQ ID NO: 5550 - DNA, 146 bp, Artificial Sequence
  Bisulfite Padlock Probe
  misc_feature 96, 97, 98, 99, 100, 101: n = A,T,C or G
gactggaagagcactgttctactctaccatattactttaccaacctcgttggaggctcatcgttcctattcaggcagatgttatcgaggtccgacnnnnnnttaaattctacacctctatccaaacgatcggatacgcatgaggct

SEQ ID NO: 5551 - DNA, 146 bp, Artificial Sequence
  Bisulfite Padlock Probe
  misc_feature 96, 97, 98, 99, 100, 101: n = A,T,C or G
gactggaagagcactgttctactctaccatattactttaccgacctcgttggaggctcatcgttcctattcaggcagatgttatcgaggtccgacnnnnnnttaaattctacgcctctatccaaacgatcggatacgcatgaggct

SEQ ID NO: 5552 - DNA, 146 bp, Artificial Sequence
  Bisulfite Padlock Probe
  misc_feature 92, 93, 94, 95, 96, 97: n = A,T,C or G
gactggaagagcactgttctacttaccttaacttctaacaaacgttggaggctcatcgttcctattcaggcagatgttatcgaggtccgacnnnnnnaaacgacctaaactcaaaatataaaaatagatcggatacgcatgaggct

SEQ ID NO: 5553 - DNA, 146 bp, Artificial Sequence
  Bisulfite Padlock Probe
  misc_feature 92, 93, 94, 95, 96, 97: n = A,T,C or G
gactggaagagcactgttctacttaccttaacttctaacgaacgttggaggctcatcgttcctattcaggcagatgttatcgaggtccgacnnnnnnaaacgacctaaactcgaaatataaaaatagatcggatacgcatgaggct

SEQ ID NO: 5554 - DNA, 146 bp, Artificial Sequence
  Bisulfite Padlock Probe
  misc_feature 94, 95, 96, 97, 98, 99: n = A,T,C or G
gactggaagagcactgttctacttcctcccactcttcctccctacgttggaggctcatcgttcctattcaggcagatgttatcgaggtccgacnnnnnnaacccgaaaaactttcactaaacatccgatcggatacgcatgaggct

SEQ ID NO: 5555 - DNA, 146 bp, Artificial Sequence
  Bisulfite Padlock Probe
  misc_feature 94, 95, 96, 97, 98, 99: n = A,T,C or G
gactggaagagcactgttctacttcctcccgctcttcctccctacgttggaggctcatcgttcctattcaggcagatgttatcgaggtccgacnnnnnnaacccgaaaaactttcactaaacgtccgatcggatacgcatgaggct

SEQ ID NO: 5556 - DNA, 146 bp, Artificial Sequence
  Bisulfite Padlock Probe
  misc_feature 96, 97, 98, 99, 100, 101: n = A,T,C or G
gactggaagagcactgttctataaaaccgtcgaacgactacaaccccgttggaggctcatcgttcctattcaggcagatgttatcgaggtccgacnnnnnngactccctaaacaccttccccaaccgatcggatacgcatgaggct

SEQ ID NO: 5557 - DNA, 146 bp, Artificial Sequence
  Bisulfite Padlock Probe
  misc_feature 96, 97, 98, 99, 100, 101: n = A,T,C or G
gactggaagagcactgttctataaaaccgtcgaacgactacgaccccgttggaggctcatcgttcctattcaggcagatgttatcgaggtccgacnnnnnngactccctaaacgccttccccaaccgatcggatacgcatgaggct

SEQ ID NO: 5558 - DNA, 146 bp, Artificial Sequence
  Bisulfite Padlock Probe
  misc_feature 93, 94, 95, 96, 97, 98: n = A,T,C or G
gactggaagagcactgttctataaaccctatcccaatccctaaagttggaggctcatcgttcctattcaggcagatgttatcgaggtccgacnnnnnnttataatacaacaccaaaaacaaaacccgatcggatacgcatgaggct

SEQ ID NO: 5559 - DNA, 146 bp, Artificial Sequence
  Bisulfite Padlock Probe
  misc_feature 93, 94, 95, 96, 97, 98: n = A,T,C or G
gactggaagagcactgttctataaaccctatcccgatccctaaagttggaggctcatcgttcctattcaggcagatgttatcgaggtccgacnnnnnnttataatacgacaccaaaaacaaaacccgatcggatacgcatgaggct

SEQ ID NO: 5560 - DNA, 146 bp, Artificial Sequence
  Bisulfite Padlock Probe
  misc_feature 92, 93, 94, 95, 96, 97: n = A,T,C or G
gactggaagagcactgttctataaaccctcacgacacccaaacgttggaggctcatcgttcctattcaggcagatgttatcgaggtccgacnnnnnncaaaacttcgaaaccgaccaccactactagatcggatacgcatgaggct

SEQ ID NO: 5561 - DNA, 146 bp, Artificial Sequence
  Bisulfite Padlock Probe
  misc_feature 92, 93, 94, 95, 96, 97: n = A,T,C or G
gactggaagagcactgttctataaaccctcacgacacccgaacgttggaggctcatcgttcctattcaggcagatgttatcgaggtccgacnnnnnncaaaacttcgaaaccgaccgccactactagatcggatacgcatgaggct

SEQ ID NO: 5562 - DNA, 146 bp, Artificial Sequence
  Bisulfite Padlock Probe
  misc_feature 95, 96, 97, 98, 99, 100: n = A,T,C or G
gactggaagagcactgttctataacacacaatcaacgcgaaccacagttggaggctcatcgttcctattcaggcagatgttatcgaggtccgacnnnnnntaaacgaaaccctcaaacccaaacccgatcggatacgcatgaggct

SEQ ID NO: 5563 - DNA, 146 bp, Artificial Sequence
  Bisulfite Padlock Probe
  misc_feature 95, 96, 97, 98, 99, 100: n = A,T,C or G
gactggaagagcactgttctataacacacaatcaacgcgaaccgcagttggaggctcatcgttcctattcaggcagatgttatcgaggtccgacnnnnnntaaacgaaaccctcaaacccgaacccgatcggatacgcatgaggct

SEQ ID NO: 5564 - DNA, 146 bp, Artificial Sequence
  Bisulfite Padlock Probe
  misc_feature 93, 94, 95, 96, 97, 98: n = A,T,C or G
gactggaagagcactgttctataaccatctctttccaccctaaagttggaggctcatcgttcctattcaggcagatgttatcgaggtccgacnnnnnnaaactcctaaccccaactcaaaactcccgatcggatacgcatgaggct

SEQ ID NO: 5565 - DNA, 146 bp, Artificial Sequence
  Bisulfite Padlock Probe
  misc_feature 93, 94, 95, 96, 97, 98: n = A,T,C or G
gactggaagagcactgttctataaccatctctttccgccctaaagttggaggctcatcgttcctattcaggcagatgttatcgaggtccgacnnnnnnaaactcctaaccccaactcaaaactcccgatcggatacgcatgaggct

SEQ ID NO: 5566 - DNA, 146 bp, Artificial Sequence
  Bisulfite Padlock Probe
  misc_feature 93, 94, 95, 96, 97, 98: n = A,T,C or G
gactggaagagcactgttctataaccctctctcccttcttccccgttggaggctcatcgttcctattcaggcagatgttatcgaggtccgacnnnnnncaaaccaacctaatacccaacactaatcgatcggatacgcatgaggct

SEQ ID NO: 5567 - DNA, 146 bp, Artificial Sequence
  Bisulfite Padlock Probe
  misc_feature 93, 94, 95, 96, 97, 98: n = A,T,C or G
gactggaagagcactgttctataaccctctctcccttcttccccgttggaggctcatcgttcctattcaggcagatgttatcgaggtccgacnnnnnncaaaccaacctaatacccaacgctaatcgatcggatacgcatgaggct

SEQ ID NO: 5568 - DNA, 146 bp, Artificial Sequence
  Bisulfite Padlock Probe
  misc_feature 96, 97, 98, 99, 100, 101: n = A,T,C or G
gactggaagagcactgttctataactcccaaaacctccacctactaagttggaggctcatcgttcctattcaggcagatgttatcgaggtccgacnnnnnncccccgctactactactatcactacgatcggatacgcatgaggct

SEQ ID NO: 5569 - DNA, 146 bp, Artificial Sequence
  Bisulfite Padlock Probe
  misc_feature 96, 97, 98, 99, 100, 101: n = A,T,C or G
gactggaagagcactgttctataactcccaaaacctccacctactaagttggaggctcatcgttcctattcaggcagatgttatcgaggtccgacnnnnnncccccgctactactactatcgctacgatcggatacgcatgaggct

SEQ ID NO: 5570 - DNA, 146 bp, Artificial Sequence
  Bisulfite Padlock Probe
  misc_feature 95, 96, 97, 98, 99, 100: n = A,T,C or G
gactggaagagcactgttctataattacttcaaaatacctaaaaatgttggaggctcatcgttcctattcaggcagatgttatcgaggtccgacnnnnnnaatcccaactctaaaataccaacaccgatcggatacgcatgaggct

SEQ ID NO: 5571 - DNA, 146 bp, Artificial Sequence
  Bisulfite Padlock Probe
  misc_feature 95, 96, 97, 98, 99, 100: n = A,T,C or G
gactggaagagcactgttctataattacttcgaaatacctaaaaatgttggaggctcatcgttcctattcaggcagatgttatcgaggtccgacnnnnnnaatcccaactctaaaataccaacgccgatcggatacgcatgaggct

SEQ ID NO: 5572 - DNA, 146 bp, Artificial Sequence
  Bisulfite Padlock Probe
  misc_feature 96, 97, 98, 99, 100, 101: n = A,T,C or G
gactggaagagcactgttctatacaaaatatcaaaaataataacctcgttggaggctcatcgttcctattcaggcagatgttatcgaggtccgacnnnnnncatcgccaaaacaaaaataaaaatcgatcggatacgcatgaggct

SEQ ID NO: 5573 - DNA, 146 bp, Artificial Sequence
  Bisulfite Padlock Probe
  misc_feature 96, 97, 98, 99, 100, 101: n = A,T,C or G
gactggaagagcactgttctatacaaaatatcgaaaataataacctcgttggaggctcatcgttcctattcaggcagatgttatcgaggtccgacnnnnnncatcgccaaaacgaaaataaaaatcgatcggatacgcatgaggct

SEQ ID NO: 5574 - DNA, 146 bp, Artificial Sequence
  Bisulfite Padlock Probe
  misc_feature 95, 96, 97, 98, 99, 100: n = A,T,C or G
gactggaagagcactgttctataccaaaacaacacccctaccaaccgttggaggctcatcgttcctattcaggcagatgttatcgaggtccgacnnnnnnaaaccaaaccctaaactcccctacccgatcggatacgcatgaggct

SEQ ID NO: 5575 - DNA, 146 bp, Artificial Sequence
  Bisulfite Padlock Probe
  misc_feature 95, 96, 97, 98, 99, 100: n = A,T,C or G
gactggaagagcactgttctataccaaaacaacgcccctaccaaccgttggaggctcatcgttcctattcaggcagatgttatcgaggtccgacnnnnnnaaaccgaaccctaaactcccctacccgatcggatacgcatgaggct

SEQ ID NO: 5576 - DNA, 146 bp, Artificial Sequence
  Bisulfite Padlock Probe
  misc_feature 93, 94, 95, 96, 97, 98: n = A,T,C or G
gactggaagagcactgttctatacccccaaaaactacaccaccagttggaggctcatcgttcctattcaggcagatgttatcgaggtccgacnnnnnncctctatcctttcctaaatctataaaaagatcggatacgcatgaggct

SEQ ID NO: 5577 - DNA, 146 bp, Artificial Sequence
  Bisulfite Padlock Probe
  misc_feature 93, 94, 95, 96, 97, 98: n = A,T,C or G
gactggaagagcactgttctatacccccaaaaactacgccaccagttggaggctcatcgttcctattcaggcagatgttatcgaggtccgacnnnnnncctctatcctttcctaaatctataaaaagatcggatacgcatgaggct

SEQ ID NO: 5578 - DNA, 146 bp, Artificial Sequence
  Bisulfite Padlock Probe
  misc_feature 93, 94, 95, 96, 97, 98: n = A,T,C or G
gactggaagagcactgttctatacccgctacaatataccaccacgttggaggctcatcgttcctattcaggcagatgttatcgaggtccgacnnnnnnctactacgtaaactcattcctactaaacgatcggatacgcatgaggct

SEQ ID NO: 5579 - DNA, 146 bp, Artificial Sequence
  Bisulfite Padlock Probe
  misc_feature 93, 94, 95, 96, 97, 98: n = A,T,C or G
gactggaagagcactgttctatacccgctacgatataccaccacgttggaggctcatcgttcctattcaggcagatgttatcgaggtccgacnnnnnnctactacgtaaactcgttcctactaaacgatcggatacgcatgaggct

SEQ ID NO: 5580 - DNA, 146 bp, Artificial Sequence
  Bisulfite Padlock Probe
  misc_feature 96, 97, 98, 99, 100, 101: n = A,T,C or G
gactggaagagcactgttctatactccaaatacaaaacgacaactacgttggaggctcatcgttcctattcaggcagatgttatcgaggtccgacnnnnnnacgaacgacaacaacgacataacccgatcggatacgcatgaggct

SEQ ID NO: 5581 - DNA, 146 bp, Artificial Sequence
  Bisulfite Padlock Probe
  misc_feature 96, 97, 98, 99, 100, 101: n = A,T,C or G
gactggaagagcactgttctatactccaaatacaaaacgacgactacgttggaggctcatcgttcctattcaggcagatgttatcgaggtccgacnnnnnnacgaacgacaacaacgacgtaacccgatcggatacgcatgaggct

SEQ ID NO: 5582 - DNA, 146 bp, Artificial Sequence
  Bisulfite Padlock Probe
  misc_feature 95, 96, 97, 98, 99, 100: n = A,T,C or G
gactggaagagcactgttctatataaaacgtcgacgcgcgaaaccagttggaggctcatcgttcctattcaggcagatgttatcgaggtccgacnnnnnncgcgcaacccacctactccttaaaaagatcggatacgcatgaggct

SEQ ID NO: 5583 - DNA, 146 bp, Artificial Sequence
  Bisulfite Padlock Probe
  misc_feature 95, 96, 97, 98, 99, 100: n = A,T,C or G
gactggaagagcactgttctatataaaacgtcgacgcgcgaaaccggttggaggctcatcgttcctattcaggcagatgttatcgaggtccgacnnnnnncgcgcgacccacctactccttaaaaagatcggatacgcatgaggct

SEQ ID NO: 5584 - DNA, 146 bp, Artificial Sequence
  Bisulfite Padlock Probe
  misc_feature 96, 97, 98, 99, 100, 101: n = A,T,C or G
gactggaagagcactgttctatatatttatacaataaaactatttacgttggaggctcatcgttcctattcaggcagatgttatcgaggtccgacnnnnnnacgaaacaaacgataactcacccctgatcggatacgcatgaggct

SEQ ID NO: 5585 - DNA, 146 bp, Artificial Sequence
  Bisulfite Padlock Probe
  misc_feature 96, 97, 98, 99, 100, 101: n = A,T,C or G
gactggaagagcactgttctatatatttatacaataaaactatttacgttggaggctcatcgttcctattcaggcagatgttatcgaggtccgacnnnnnnacgaaacaaacgataactcgcccctgatcggatacgcatgaggct

SEQ ID NO: 5586 - DNA, 146 bp, Artificial Sequence
  Bisulfite Padlock Probe
  misc_feature 96, 97, 98, 99, 100, 101: n = A,T,C or G
gactggaagagcactgttctatatccctaacgcaatactacttctacgttggaggctcatcgttcctattcaggcagatgttatcgaggtccgacnnnnnnctccaacgcgaacctctcaaacaacgatcggatacgcatgaggct

SEQ ID NO: 5587 - DNA, 146 bp, Artificial Sequence
  Bisulfite Padlock Probe
  misc_feature 96, 97, 98, 99, 100, 101: n = A,T,C or G
gactggaagagcactgttctatatccctaacgcgatactacttctacgttggaggctcatcgttcctattcaggcagatgttatcgaggtccgacnnnnnnctccaacgcgaacctctcgaacaacgatcggatacgcatgaggct

SEQ ID NO: 5588 - DNA, 146 bp, Artificial Sequence
  Bisulfite Padlock Probe
  misc_feature 92, 93, 94, 95, 96, 97: n = A,T,C or G
gactggaagagcactgttctatattaaaactaccgcaaaaaccgttggaggctcatcgttcctattcaggcagatgttatcgaggtccgacnnnnnnaaactaacccgaccaaaaactacctaaccgatcggatacgcatgaggct

SEQ ID NO: 5589 - DNA, 146 bp, Artificial Sequence
  Bisulfite Padlock Probe
  misc_feature 92, 93, 94, 95, 96, 97: n = A,T,C or G
gactggaagagcactgttctatattaaaactaccgcgaaaaccgttggaggctcatcgttcctattcaggcagatgttatcgaggtccgacnnnnnnaaactaacccgaccgaaaactacctaaccgatcggatacgcatgaggct

SEQ ID NO: 5590 - DNA, 146 bp, Artificial Sequence
  Bisulfite Padlock Probe
  misc_feature 95, 96, 97, 98, 99, 100: n = A,T,C or G
gactggaagagcactgttctatcaaaatctccaactaaaacaaaaagttggaggctcatcgttcctattcaggcagatgttatcgaggtccgacnnnnnnccaaaacttttataatttcctcccccgatcggatacgcatgaggct

SEQ ID NO: 5591 - DNA, 146 bp, Artificial Sequence
  Bisulfite Padlock Probe
  misc_feature 92, 93, 94, 95, 96, 97: n = A,T,C or G
gactggaagagcactgttctatcacctatctaattctccaaaagttggaggctcatcgttcctattcaggcagatgttatcgaggtccgacnnnnnnatcccaaccccaaccaaactcctatacttgatcggatacgcatgaggct

SEQ ID NO: 5592 - DNA, 146 bp, Artificial Sequence
  Bisulfite Padlock Probe
  misc_feature 92, 93, 94, 95, 96, 97: n = A,T,C or G
gactggaagagcactgttctatccaaaatctaaacccaaaatagttggaggctcatcgttcctattcaggcagatgttatcgaggtccgacnnnnnntacaaactacactccccttcctaatactagatcggatacgcatgaggct

SEQ ID NO: 5593 - DNA, 146 bp, Artificial Sequence
  Bisulfite Padlock Probe
  misc_feature 92, 93, 94, 95, 96, 97: n = A,T,C or G
gactggaagagcactgttctatccaaaatctaaacccgaaatagttggaggctcatcgttcctattcaggcagatgttatcgaggtccgacnnnnnntacaaactacgctccccttcctaatactagatcggatacgcatgaggct

SEQ ID NO: 5594 - DNA, 146 bp, Artificial Sequence
  Bisulfite Padlock Probe
  misc_feature 92, 93, 94, 95, 96, 97: n = A,T,C or G
gactggaagagcactgttctatccaactctacaaactaaccctgttggaggctcatcgttcctattcaggcagatgttatcgaggtccgacnnnnnntatacttcccgctccccaaaaaccttaaagatcggatacgcatgaggct

SEQ ID NO: 5595 - DNA, 146 bp, Artificial Sequence
  Bisulfite Padlock Probe
  misc_feature 92, 93, 94, 95, 96, 97: n = A,T,C or G
gactggaagagcactgttctatccaactctacgaactaaccctgttggaggctcatcgttcctattcaggcagatgttatcgaggtccgacnnnnnntatacttcccgctccccgaaaaccttaaagatcggatacgcatgaggct

SEQ ID NO: 5596 - DNA, 146 bp, Artificial Sequence
  Bisulfite Padlock Probe
  misc_feature 95, 96, 97, 98, 99, 100: n = A,T,C or G
gactggaagagcactgttctatccccgaactccaaacaacctaaaagttggaggctcatcgttcctattcaggcagatgttatcgaggtccgacnnnnnnaaaaacgacgacgacgacgcaaaaaagatcggatacgcatgaggct

SEQ ID NO: 5597 - DNA, 146 bp, Artificial Sequence
  Bisulfite Padlock Probe
  misc_feature 95, 96, 97, 98, 99, 100: n = A,T,C or G
gactggaagagcactgttctatccccgaactccaaacgacctaaaagttggaggctcatcgttcctattcaggcagatgttatcgaggtccgacnnnnnnaaaaacgacgacgacgacgcgaaaaagatcggatacgcatgaggct

SEQ ID NO: 5598 - DNA, 146 bp, Artificial Sequence
  Bisulfite Padlock Probe
  misc_feature 92, 93, 94, 95, 96, 97: n = A,T,C or G
gactggaagagcactgttctatcccctcgtaacctccaaccctgttggaggctcatcgttcctattcaggcagatgttatcgaggtccgacnnnnnntccccattattttctctattattaccatcgatcggatacgcatgaggct

SEQ ID NO: 5599 - DNA, 146 bp, Artificial Sequence
  Bisulfite Padlock Probe
  misc_feature 92, 93, 94, 95, 96, 97: n = A,T,C or G
gactggaagagcactgttctatcccctcgtaacctccgaccctgttggaggctcatcgttcctattcaggcagatgttatcgaggtccgacnnnnnntccccgttattttctctattattaccatcgatcggatacgcatgaggct

SEQ ID NO: 5600 - DNA, 146 bp, Artificial Sequence
  Bisulfite Padlock Probe
  misc_feature 94, 95, 96, 97, 98, 99: n = A,T,C or G
gactggaagagcactgttctatcccgctacgatacccacaaaaaagttggaggctcatcgttcctattcaggcagatgttatcgaggtccgacnnnnnncaacccaaccgaaaccgctacaaaaacgatcggatacgcatgaggct

SEQ ID NO: 5601 - DNA, 146 bp, Artificial Sequence
  Bisulfite Padlock Probe
  misc_feature 94, 95, 96, 97, 98, 99: n = A,T,C or G
gactggaagagcactgttctatcccgctacgatacccacgaaaaagttggaggctcatcgttcctattcaggcagatgttatcgaggtccgacnnnnnncaacccaaccgaaaccgctacgaaaacgatcggatacgcatgaggct

SEQ ID NO: 5602 - DNA, 146 bp, Artificial Sequence
  Bisulfite Padlock Probe
  misc_feature 92, 93, 94, 95, 96, 97: n = A,T,C or G
gactggaagagcactgttctatccctcatacaccataaccctcgttggaggctcatcgttcctattcaggcagatgttatcgaggtccgacnnnnnnccacccctatcgccataaaaacaaaaattgatcggatacgcatgaggct

SEQ ID NO: 5603 - DNA, 146 bp, Artificial Sequence
  Bisulfite Padlock Probe
  misc_feature 92, 93, 94, 95, 96, 97: n = A,T,C or G
gactggaagagcactgttctatccctcatacaccgtaaccctcgttggaggctcatcgttcctattcaggcagatgttatcgaggtccgacnnnnnnccacccctatcgccgtaaaaacaaaaattgatcggatacgcatgaggct

SEQ ID NO: 5604 - DNA, 146 bp, Artificial Sequence
  Bisulfite Padlock Probe
  misc_feature 96, 97, 98, 99, 100, 101: n = A,T,C or G
gactggaagagcactgttctatcccttcccccgaacacaaacttattgttggaggctcatcgttcctattcaggcagatgttatcgaggtccgacnnnnnnaaaaacgtaaatacgaccgccactagatcggatacgcatgaggct

SEQ ID NO: 5605 - DNA, 146 bp, Artificial Sequence
  Bisulfite Padlock Probe
  misc_feature 96, 97, 98, 99, 100, 101: n = A,T,C or G
gactggaagagcactgttctatcccttcccccgaacacgaacttattgttggaggctcatcgttcctattcaggcagatgttatcgaggtccgacnnnnnnaaaaacgtaaatacgaccgccgctagatcggatacgcatgaggct

SEQ ID NO: 5606 - DNA, 146 bp, Artificial Sequence
  Bisulfite Padlock Probe
  misc_feature 95, 96, 97, 98, 99, 100: n = A,T,C or G
gactggaagagcactgttctatcgaaatctccaactaaaacaaaaagttggaggctcatcgttcctattcaggcagatgttatcgaggtccgacnnnnnnccaaaacttttataatttcctcccccgatcggatacgcatgaggct

SEQ ID NO: 5607 - DNA, 146 bp, Artificial Sequence
  Bisulfite Padlock Probe
  misc_feature 92, 93, 94, 95, 96, 97: n = A,T,C or G
gactggaagagcactgttctatcgcctatctaattctccaaaagttggaggctcatcgttcctattcaggcagatgttatcgaggtccgacnnnnnnatcccaaccccaaccaaactcctatacttgatcggatacgcatgaggct

SEQ ID NO: 5608 - DNA, 146 bp, Artificial Sequence
  Bisulfite Padlock Probe
  misc_feature 95, 96, 97, 98, 99, 100: n = A,T,C or G
gactggaagagcactgttctatctaaacaaacaaccccctcctcacgttggaggctcatcgttcctattcaggcagatgttatcgaggtccgacnnnnnncgccccaaaaccctatattaaaaccagatcggatacgcatgaggct

SEQ ID NO: 5609 - DNA, 146 bp, Artificial Sequence
  Bisulfite Padlock Probe
  misc_feature 95, 96, 97, 98, 99, 100: n = A,T,C or G
gactggaagagcactgttctatctaaacgaacaaccccctcctcacgttggaggctcatcgttcctattcaggcagatgttatcgaggtccgacnnnnnncgccccgaaaccctatattaaaaccagatcggatacgcatgaggct

SEQ ID NO: 5610 - DNA, 146 bp, Artificial Sequence
  Bisulfite Padlock Probe
  misc_feature 96, 97, 98, 99, 100, 101: n = A,T,C or G
gactggaagagcactgttctattactaaaaacccaaaaaactaaaaagttggaggctcatcgttcctattcaggcagatgttatcgaggtccgacnnnnnnaaaccgaaaccgaaaccaaaccaaagatcggatacgcatgaggct

SEQ ID NO: 5611 - DNA, 146 bp, Artificial Sequence
  Bisulfite Padlock Probe
  misc_feature 96, 97, 98, 99, 100, 101: n = A,T,C or G
gactggaagagcactgttctattactaaaaacccgaaaaactaaaaagttggaggctcatcgttcctattcaggcagatgttatcgaggtccgacnnnnnnaaaccgaaaccgaaaccgaaccaaagatcggatacgcatgaggct

SEQ ID NO: 5612 - DNA, 146 bp, Artificial Sequence
  Bisulfite Padlock Probe
  misc_feature 96, 97, 98, 99, 100, 101: n = A,T,C or G
gactggaagagcactgttctattctacatcccaaaattaactaaaaagttggaggctcatcgttcctattcaggcagatgttatcgaggtccgacnnnnnncaccttcactcttcctcttccccacgatcggatacgcatgaggct

SEQ ID NO: 5613 - DNA, 146 bp, Artificial Sequence
  Bisulfite Padlock Probe
  misc_feature 96, 97, 98, 99, 100, 101: n = A,T,C or G
gactggaagagcactgttctattctacgtcccaaaattaactaaaaagttggaggctcatcgttcctattcaggcagatgttatcgaggtccgacnnnnnncaccttcgctcttcctcttccccacgatcggatacgcatgaggct

SEQ ID NO: 5614 - DNA, 146 bp, Artificial Sequence
  Bisulfite Padlock Probe
  misc_feature 92, 93, 94, 95, 96, 97: n = A,T,C or G
gactggaagagcactgttctattctactcacctaacaactcccgttggaggctcatcgttcctattcaggcagatgttatcgaggtccgacnnnnnncttaaacaaaatttttataaccaaactacgatcggatacgcatgaggct

SEQ ID NO: 5615 - DNA, 146 bp, Artificial Sequence
  Bisulfite Padlock Probe
  misc_feature 92, 93, 94, 95, 96, 97: n = A,T,C or G
gactggaagagcactgttctattctactcgcctaacaactcccgttggaggctcatcgttcctattcaggcagatgttatcgaggtccgacnnnnnncttaaacgaaatttttataaccaaactacgatcggatacgcatgaggct

SEQ ID NO: 5616 - DNA, 146 bp, Artificial Sequence
  Bisulfite Padlock Probe
  misc_feature 93, 94, 95, 96, 97, 98: n = A,T,C or G
gactggaagagcactgttctatttatataccatttccaacccctgttggaggctcatcgttcctattcaggcagatgttatcgaggtccgacnnnnnnaccctcaattttcccaactataccctaagatcggatacgcatgaggct

SEQ ID NO: 5617 - DNA, 146 bp, Artificial Sequence
  Bisulfite Padlock Probe
  misc_feature 93, 94, 95, 96, 97, 98: n = A,T,C or G
gactggaagagcactgttctatttatataccatttccaacccctgttggaggctcatcgttcctattcaggcagatgttatcgaggtccgacnnnnnnaccctcaattttcccgactataccctaagatcggatacgcatgaggct

SEQ ID NO: 5618 - DNA, 146 bp, Artificial Sequence
  Bisulfite Padlock Probe
  misc_feature 92, 93, 94, 95, 96, 97: n = A,T,C or G
gactggaagagcactgttctatttccccgcccatccaaaaaacgttggaggctcatcgttcctattcaggcagatgttatcgaggtccgacnnnnnnccaacaatcccgaatacaaaattaaaatagatcggatacgcatgaggct

SEQ ID NO: 5619 - DNA, 146 bp, Artificial Sequence
  Bisulfite Padlock Probe
  misc_feature 92, 93, 94, 95, 96, 97: n = A,T,C or G
gactggaagagcactgttctatttccccgcccatccgaaaaacgttggaggctcatcgttcctattcaggcagatgttatcgaggtccgacnnnnnnccaacaatcccgaatacgaaattaaaatagatcggatacgcatgaggct

SEQ ID NO: 5620 - DNA, 146 bp, Artificial Sequence
  Bisulfite Padlock Probe
  misc_feature 96, 97, 98, 99, 100, 101: n = A,T,C or G
gactggaagagcactgttctatttctataaaaatcccaaaaattctcgttggaggctcatcgttcctattcaggcagatgttatcgaggtccgacnnnnnncaactactaaacgcccccactcccagatcggatacgcatgaggct

SEQ ID NO: 5621 - DNA, 146 bp, Artificial Sequence
  Bisulfite Padlock Probe
  misc_feature 96, 97, 98, 99, 100, 101: n = A,T,C or G
gactggaagagcactgttctatttctataaaaatcccgaaaattctcgttggaggctcatcgttcctattcaggcagatgttatcgaggtccgacnnnnnncaactactaaacgcccccactcccggatcggatacgcatgaggct

SEQ ID NO: 5622 - DNA, 146 bp, Artificial Sequence
  Bisulfite Padlock Probe
  misc_feature 93, 94, 95, 96, 97, 98: n = A,T,C or G
gactggaagagcactgttctcaaaacataaaacaatctaactaagttggaggctcatcgttcctattcaggcagatgttatcgaggtccgacnnnnnnccaccatcactttaaatatctacaaattgatcggatacgcatgaggct

SEQ ID NO: 5623 - DNA, 146 bp, Artificial Sequence
  Bisulfite Padlock Probe
  misc_feature 93, 94, 95, 96, 97, 98: n = A,T,C or G
gactggaagagcactgttctcaaaacccacctctactttactatgttggaggctcatcgttcctattcaggcagatgttatcgaggtccgacnnnnnntttcaactcttaactccaccctctaatcgatcggatacgcatgaggct

SEQ ID NO: 5624 - DNA, 146 bp, Artificial Sequence
  Bisulfite Padlock Probe
  misc_feature 93, 94, 95, 96, 97, 98: n = A,T,C or G
gactggaagagcactgttctcaaaacccgcctctactttactatgttggaggctcatcgttcctattcaggcagatgttatcgaggtccgacnnnnnntttcaactcttaactccgccctctaatcgatcggatacgcatgaggct

SEQ ID NO: 5625 - DNA, 146 bp, Artificial Sequence
  Bisulfite Padlock Probe
  misc_feature 92, 93, 94, 95, 96, 97: n = A,T,C or G
gactggaagagcactgttctcaaaacgccttcccaccatatccgttggaggctcatcgttcctattcaggcagatgttatcgaggtccgacnnnnnnaaaaacaacaaattaacgtaaacaaaaacgatcggatacgcatgaggct

SEQ ID NO: 5626 - DNA, 146 bp, Artificial Sequence
  Bisulfite Padlock Probe
  misc_feature 92, 93, 94, 95, 96, 97: n = A,T,C or G
gactggaagagcactgttctcaaaacgccttcccgccatatccgttggaggctcatcgttcctattcaggcagatgttatcgaggtccgacnnnnnnaaaaacaacaaattaacgtaaacgaaaacgatcggatacgcatgaggct

SEQ ID NO: 5627 - DNA, 146 bp, Artificial Sequence
  Bisulfite Padlock Probe
  misc_feature 92, 93, 94, 95, 96, 97: n = A,T,C or G
gactggaagagcactgttctcaaaatcaccttcttatctaaatgttggaggctcatcgttcctattcaggcagatgttatcgaggtccgacnnnnnnttatcccaccataaaataccccaaaattcgatcggatacgcatgaggct

SEQ ID NO: 5628 - DNA, 146 bp, Artificial Sequence
  Bisulfite Padlock Probe
  misc_feature 92, 93, 94, 95, 96, 97: n = A,T,C or G
gactggaagagcactgttctcaaaatcgccttcttatctaaatgttggaggctcatcgttcctattcaggcagatgttatcgaggtccgacnnnnnnttatcccgccataaaataccccaaaattcgatcggatacgcatgaggct

SEQ ID NO: 5629 - DNA, 146 bp, Artificial Sequence
  Bisulfite Padlock Probe
  misc_feature 96, 97, 98, 99, 100, 101: n = A,T,C or G
gactggaagagcactgttctcaaacctccctcccctccaaaataaacgttggaggctcatcgttcctattcaggcagatgttatcgaggtccgacnnnnnngctacgctcaaataccgacaaacccgatcggatacgcatgaggct

SEQ ID NO: 5630 - DNA, 146 bp, Artificial Sequence
  Bisulfite Padlock Probe
  misc_feature 96, 97, 98, 99, 100, 101: n = A,T,C or G
gactggaagagcactgttctcaaacctccctcccctccaaaataaacgttggaggctcatcgttcctattcaggcagatgttatcgaggtccgacnnnnnngctacgctcaaataccgacgaacccgatcggatacgcatgaggct

SEQ ID NO: 5631 - DNA, 146 bp, Artificial Sequence
  Bisulfite Padlock Probe
  misc_feature 93, 94, 95, 96, 97, 98: n = A,T,C or G
gactggaagagcactgttctcaaactcaaacccacacccaaaaagttggaggctcatcgttcctattcaggcagatgttatcgaggtccgacnnnnnnaaaaacaaaaactaccgcgaccactcaagatcggatacgcatgaggct

SEQ ID NO: 5632 - DNA, 146 bp, Artificial Sequence
  Bisulfite Padlock Probe
  misc_feature 93, 94, 95, 96, 97, 98: n = A,T,C or G
gactggaagagcactgttctcaaactcaaacccacgcccaaaaagttggaggctcatcgttcctattcaggcagatgttatcgaggtccgacnnnnnnaaaaacaaaaactaccgcgaccgctcaagatcggatacgcatgaggct

SEQ ID NO: 5633 - DNA, 146 bp, Artificial Sequence
  Bisulfite Padlock Probe
  misc_feature 93, 94, 95, 96, 97, 98: n = A,T,C or G
gactggaagagcactgttctcaaatccaaaaccctccccttatcgttggaggctcatcgttcctattcaggcagatgttatcgaggtccgacnnnnnntaatacccaaacgctaactcccaaaaacgatcggatacgcatgaggct

SEQ ID NO: 5634 - DNA, 146 bp, Artificial Sequence
  Bisulfite Padlock Probe
  misc_feature 93, 94, 95, 96, 97, 98: n = A,T,C or G
gactggaagagcactgttctcaaatccaaaaccctccccttatcgttggaggctcatcgttcctattcaggcagatgttatcgaggtccgacnnnnnntaatacccaaacgctaactcccgaaaacgatcggatacgcatgaggct

SEQ ID NO: 5635 - DNA, 146 bp, Artificial Sequence
  Bisulfite Padlock Probe
  misc_feature 92, 93, 94, 95, 96, 97: n = A,T,C or G
gactggaagagcactgttctcaacacccaacactcccttctccgttggaggctcatcgttcctattcaggcagatgttatcgaggtccgacnnnnnnatcctacactaccctctacaaaataacccgatcggatacgcatgaggct

SEQ ID NO: 5636 - DNA, 146 bp, Artificial Sequence
  Bisulfite Padlock Probe
  misc_feature 92, 93, 94, 95, 96, 97: n = A,T,C or G
gactggaagagcactgttctcaacacccaacgctcccttctccgttggaggctcatcgttcctattcaggcagatgttatcgaggtccgacnnnnnnatcctacactaccctctacgaaataacccgatcggatacgcatgaggct

SEQ ID NO: 5637 - DNA, 146 bp, Artificial Sequence
  Bisulfite Padlock Probe
  misc_feature 96, 97, 98, 99, 100, 101: n = A,T,C or G
gactggaagagcactgttctcaaccactcctaaaaccccaacaatccgttggaggctcatcgttcctattcaggcagatgttatcgaggtccgacnnnnnnacgaataaacaccgcgccaaaaaccgatcggatacgcatgaggct

SEQ ID NO: 5638 - DNA, 146 bp, Artificial Sequence
  Bisulfite Padlock Probe
  misc_feature 96, 97, 98, 99, 100, 101: n = A,T,C or G
gactggaagagcactgttctcaaccactcctaaaaccccgacaatccgttggaggctcatcgttcctattcaggcagatgttatcgaggtccgacnnnnnnacgaataaacaccgcgccgaaaaccgatcggatacgcatgaggct

SEQ ID NO: 5639 - DNA, 146 bp, Artificial Sequence
  Bisulfite Padlock Probe
  misc_feature 92, 93, 94, 95, 96, 97: n = A,T,C or G
gactggaagagcactgttctcaacccgaaatttcctacgccacgttggaggctcatcgttcctattcaggcagatgttatcgaggtccgacnnnnnnaaaaacgaaacgccgaacgacaacaaaaagatcggatacgcatgaggct

SEQ ID NO: 5640 - DNA, 146 bp, Artificial Sequence
  Bisulfite Padlock Probe
  misc_feature 92, 93, 94, 95, 96, 97: n = A,T,C or G
gactggaagagcactgttctcaacccgaaatttcctacgccgcgttggaggctcatcgttcctattcaggcagatgttatcgaggtccgacnnnnnnaaaaacgaaacgccgaacgacgacaaaaagatcggatacgcatgaggct

SEQ ID NO: 5641 - DNA, 146 bp, Artificial Sequence
  Bisulfite Padlock Probe
  misc_feature 96, 97, 98, 99, 100, 101: n = A,T,C or G
gactggaagagcactgttctcaacgaaaactacgaaacgccaaaaaagttggaggctcatcgttcctattcaggcagatgttatcgaggtccgacnnnnnnatcctacaaccgcacctataccaacgatcggatacgcatgaggct

SEQ ID NO: 5642 - DNA, 146 bp, Artificial Sequence
  Bisulfite Padlock Probe
  misc_feature 96, 97, 98, 99, 100, 101: n = A,T,C or G
gactggaagagcactgttctcaacgaaaactacgaaacgccgaaaaagttggaggctcatcgttcctattcaggcagatgttatcgaggtccgacnnnnnnatcctacaaccgcacctataccgacgatcggatacgcatgaggct

SEQ ID NO: 5643 - DNA, 146 bp, Artificial Sequence
  Bisulfite Padlock Probe
  misc_feature 92, 93, 94, 95, 96, 97: n = A,T,C or G
gactggaagagcactgttctcaactccgaaccaaaacctccccgttggaggctcatcgttcctattcaggcagatgttatcgaggtccgacnnnnnnaaatttctataactcatcctctctaaaacgatcggatacgcatgaggct

SEQ ID NO: 5644 - DNA, 146 bp, Artificial Sequence
  Bisulfite Padlock Probe
  misc_feature 92, 93, 94, 95, 96, 97: n = A,T,C or G
gactggaagagcactgttctcaactccgaaccgaaacctccccgttggaggctcatcgttcctattcaggcagatgttatcgaggtccgacnnnnnnaaatttctataactcatcctctctaaaacgatcggatacgcatgaggct

SEQ ID NO: 5645 - DNA, 146 bp, Artificial Sequence
  Bisulfite Padlock Probe
  misc_feature 95, 96, 97, 98, 99, 100: n = A,T,C or G
gactggaagagcactgttctcaataacaaactaaataaaaactcccgttggaggctcatcgttcctattcaggcagatgttatcgaggtccgacnnnnnnaccaaatattccaattcacctccatcgatcggatacgcatgaggct

SEQ ID NO: 5646 - DNA, 146 bp, Artificial Sequence
  Bisulfite Padlock Probe
  misc_feature 95, 96, 97, 98, 99, 100: n = A,T,C or G
gactggaagagcactgttctcaataatctcctaatcctaatcttccgttggaggctcatcgttcctattcaggcagatgttatcgaggtccgacnnnnnnacaaatacctacgtaacaatcaaaccgatcggatacgcatgaggct

SEQ ID NO: 5647 - DNA, 146 bp, Artificial Sequence
  Bisulfite Padlock Probe
  misc_feature 92, 93, 94, 95, 96, 97: n = A,T,C or G
gactggaagagcactgttctcacactcgctctcacacacactcgttggaggctcatcgttcctattcaggcagatgttatcgaggtccgacnnnnnnaacgaaaaacgaacgaacgaacgacataagatcggatacgcatgaggct

SEQ ID NO: 5648 - DNA, 146 bp, Artificial Sequence
  Bisulfite Padlock Probe
  misc_feature 92, 93, 94, 95, 96, 97: n = A,T,C or G
gactggaagagcactgttctcacactcgctctcacacacgctcgttggaggctcatcgttcctattcaggcagatgttatcgaggtccgacnnnnnnaacgaaaaacgaacgaacgaacgacgtaagatcggatacgcatgaggct

SEQ ID NO: 5649 - DNA, 146 bp, Artificial Sequence
  Bisulfite Padlock Probe
  misc_feature 92, 93, 94, 95, 96, 97: n = A,T,C or G
gactggaagagcactgttctcaccaaataaaatcaatacaatagttggaggctcatcgttcctattcaggcagatgttatcgaggtccgacnnnnnnacccatctaaaaccaaaataaaaacaaaagatcggatacgcatgaggct

SEQ ID NO: 5650 - DNA, 146 bp, Artificial Sequence
  Bisulfite Padlock Probe
  misc_feature 92, 93, 94, 95, 96, 97: n = A,T,C or G
gactggaagagcactgttctcaccaaataaaatcgatacaatagttggaggctcatcgttcctattcaggcagatgttatcgaggtccgacnnnnnnacccgtctaaaaccaaaataaaaacaaaagatcggatacgcatgaggct

SEQ ID NO: 5651 - DNA, 146 bp, Artificial Sequence
  Bisulfite Padlock Probe
  misc_feature 93, 94, 95, 96, 97, 98: n = A,T,C or G
gactggaagagcactgttctcacccccaacttaattccccaaacgttggaggctcatcgttcctattcaggcagatgttatcgaggtccgacnnnnnnacacctaccctttactcttaaatatttcgatcggatacgcatgaggct

SEQ ID NO: 5652 - DNA, 146 bp, Artificial Sequence
  Bisulfite Padlock Probe
  misc_feature 93, 94, 95, 96, 97, 98: n = A,T,C or G
gactggaagagcactgttctcacccccaacttaattccccgaacgttggaggctcatcgttcctattcaggcagatgttatcgaggtccgacnnnnnnacgcctaccctttactcttaaatatttcgatcggatacgcatgaggct

SEQ ID NO: 5653 - DNA, 146 bp, Artificial Sequence
  Bisulfite Padlock Probe
  misc_feature 96, 97, 98, 99, 100, 101: n = A,T,C or G
gactggaagagcactgttctcacctaaataaataccataaataaaaagttggaggctcatcgttcctattcaggcagatgttatcgaggtccgacnnnnnnaaaaacgaactctacccccgacacagatcggatacgcatgaggct

SEQ ID NO: 5654 - DNA, 146 bp, Artificial Sequence
  Bisulfite Padlock Probe
  misc_feature 96, 97, 98, 99, 100, 101: n = A,T,C or G
gactggaagagcactgttctcacctaaataaataccataaataaaaagttggaggctcatcgttcctattcaggcagatgttatcgaggtccgacnnnnnnaaaaacgaactctacccccgacacggatcggatacgcatgaggct

SEQ ID NO: 5655 - DNA, 146 bp, Artificial Sequence
  Bisulfite Padlock Probe
  misc_feature 92, 93, 94, 95, 96, 97: n = A,T,C or G
gactggaagagcactgttctcactatactctcccaccccaaacgttggaggctcatcgttcctattcaggcagatgttatcgaggtccgacnnnnnnaaaataaccaaaatcattaacactataaagatcggatacgcatgaggct

SEQ ID NO: 5656 - DNA, 146 bp, Artificial Sequence
  Bisulfite Padlock Probe
  misc_feature 92, 93, 94, 95, 96, 97: n = A,T,C or G
gactggaagagcactgttctcactatactctcccaccccaaacgttggaggctcatcgttcctattcaggcagatgttatcgaggtccgacnnnnnnaaaataaccaaaatcattaacgctataaagatcggatacgcatgaggct

SEQ ID NO: 5657 - DNA, 146 bp, Artificial Sequence
  Bisulfite Padlock Probe
  misc_feature 94, 95, 96, 97, 98, 99: n = A,T,C or G
gactggaagagcactgttctcacttaatccaaaactacttcccccgttggaggctcatcgttcctattcaggcagatgttatcgaggtccgacnnnnnntctattttatttcctctaatatatttagatcggatacgcatgaggct

SEQ ID NO: 5658 - DNA, 146 bp, Artificial Sequence
  Bisulfite Padlock Probe
  misc_feature 94, 95, 96, 97, 98, 99: n = A,T,C or G
gactggaagagcactgttctcacttaatccgaaactacttcccccgttggaggctcatcgttcctattcaggcagatgttatcgaggtccgacnnnnnntctattttatttcctctaatatatttagatcggatacgcatgaggct

SEQ ID NO: 5659 - DNA, 146 bp, Artificial Sequence
  Bisulfite Padlock Probe
  misc_feature 92, 93, 94, 95, 96, 97: n = A,T,C or G
gactggaagagcactgttctcatcaaaccaaccaaatcctaccgttggaggctcatcgttcctattcaggcagatgttatcgaggtccgacnnnnnnaaaactaccttcttccatcctcccctaaagatcggatacgcatgaggct

SEQ ID NO: 5660 - DNA, 146 bp, Artificial Sequence
  Bisulfite Padlock Probe
  misc_feature 92, 93, 94, 95, 96, 97: n = A,T,C or G
gactggaagagcactgttctcatcaaaccgaccaaatcctaccgttggaggctcatcgttcctattcaggcagatgttatcgaggtccgacnnnnnnaaaactaccttcttccatcctcccctaaagatcggatacgcatgaggct

SEQ ID NO: 5661 - DNA, 146 bp, Artificial Sequence
  Bisulfite Padlock Probe
  misc_feature 92, 93, 94, 95, 96, 97: n = A,T,C or G
gactggaagagcactgttctccaaataaaaactaaaacaacctgttggaggctcatcgttcctattcaggcagatgttatcgaggtccgacnnnnnnaaacaaataccacaaatccaaactactaagatcggatacgcatgaggct

SEQ ID NO: 5662 - DNA, 146 bp, Artificial Sequence
  Bisulfite Padlock Probe
  misc_feature 95, 96, 97, 98, 99, 100: n = A,T,C or G
gactggaagagcactgttctccaaatacttctaaataaccatacccgttggaggctcatcgttcctattcaggcagatgttatcgaggtccgacnnnnnnaaatcactcgaccgtaaatcccacccgatcggatacgcatgaggct

SEQ ID NO: 5663 - DNA, 146 bp, Artificial Sequence
  Bisulfite Padlock Probe
  misc_feature 95, 96, 97, 98, 99, 100: n = A,T,C or G
gactggaagagcactgttctccaaatacttctaaataaccatacccgttggaggctcatcgttcctattcaggcagatgttatcgaggtccgacnnnnnnaaatcactcgaccgtaaatcccgcccgatcggatacgcatgaggct

SEQ ID NO: 5664 - DNA, 146 bp, Artificial Sequence
  Bisulfite Padlock Probe
  misc_feature 92, 93, 94, 95, 96, 97: n = A,T,C or G
gactggaagagcactgttctccaacactaaccccctaaccctcgttggaggctcatcgttcctattcaggcagatgttatcgaggtccgacnnnnnnacgacgaatcgaaaaactaatacaaaaacgatcggatacgcatgaggct

SEQ ID NO: 5665 - DNA, 146 bp, Artificial Sequence
  Bisulfite Padlock Probe
  misc_feature 92, 93, 94, 95, 96, 97: n = A,T,C or G
gactggaagagcactgttctccaacgctaaccccctaaccctcgttggaggctcatcgttcctattcaggcagatgttatcgaggtccgacnnnnnnacgacgaatcgaaaaactaatacgaaaacgatcggatacgcatgaggct

SEQ ID NO: 5666 - DNA, 146 bp, Artificial Sequence
  Bisulfite Padlock Probe
  misc_feature 92, 93, 94, 95, 96, 97: n = A,T,C or G
gactggaagagcactgttctccactacccaaccaaaatctcccgttggaggctcatcgttcctattcaggcagatgttatcgaggtccgacnnnnnnacaaacttattaatacaacactaaaacccgatcggatacgcatgaggct

SEQ ID NO: 5667 - DNA, 146 bp, Artificial Sequence
  Bisulfite Padlock Probe
  misc_feature 95, 96, 97, 98, 99, 100: n = A,T,C or G
gactggaagagcactgttctccacttcaatcccaatcccataacccgttggaggctcatcgttcctattcaggcagatgttatcgaggtccgacnnnnnncctacataaaacgacgttcacctcccgatcggatacgcatgaggct

SEQ ID NO: 5668 - DNA, 146 bp, Artificial Sequence
  Bisulfite Padlock Probe
  misc_feature 95, 96, 97, 98, 99, 100: n = A,T,C or G
gactggaagagcactgttctccacttcgatcccaatcccataacccgttggaggctcatcgttcctattcaggcagatgttatcgaggtccgacnnnnnncctacataaaacgacgttcgcctcccgatcggatacgcatgaggct

SEQ ID NO: 5669 - DNA, 146 bp, Artificial Sequence
  Bisulfite Padlock Probe
  misc_feature 94, 95, 96, 97, 98, 99: n = A,T,C or G
gactggaagagcactgttctcccaacatctataacttcactattagttggaggctcatcgttcctattcaggcagatgttatcgaggtccgacnnnnnnaaaataaaaccaacccccacccctacagatcggatacgcatgaggct

SEQ ID NO: 5670 - DNA, 146 bp, Artificial Sequence
  Bisulfite Padlock Probe
  misc_feature 94, 95, 96, 97, 98, 99: n = A,T,C or G
gactggaagagcactgttctcccaacatctataacttcactattagttggaggctcatcgttcctattcaggcagatgttatcgaggtccgacnnnnnnaaaataaaaccgacccccacccctacagatcggatacgcatgaggct

SEQ ID NO: 5671 - DNA, 146 bp, Artificial Sequence
  Bisulfite Padlock Probe
  misc_feature 95, 96, 97, 98, 99, 100: n = A,T,C or G
gactggaagagcactgttctcccaataccaaaaccaccctttaactgttggaggctcatcgttcctattcaggcagatgttatcgaggtccgacnnnnnnaaaaacgtcgaatacacaataacaacgatcggatacgcatgaggct

SEQ ID NO: 5672 - DNA, 146 bp, Artificial Sequence
  Bisulfite Padlock Probe
  misc_feature 95, 96, 97, 98, 99, 100: n = A,T,C or G
gactggaagagcactgttctcccaataccaaaaccgccctttaactgttggaggctcatcgttcctattcaggcagatgttatcgaggtccgacnnnnnnaaaaacgtcgaatacacaataacgacgatcggatacgcatgaggct

SEQ ID NO: 5673 - DNA, 146 bp, Artificial Sequence
  Bisulfite Padlock Probe
  misc_feature 92, 93, 94, 95, 96, 97: n = A,T,C or G
gactggaagagcactgttctcccacccactctcaaaaacacacgttggaggctcatcgttcctattcaggcagatgttatcgaggtccgacnnnnnnaaaaacgacaacccaacttactctacaacgatcggatacgcatgaggct

SEQ ID NO: 5674 - DNA, 146 bp, Artificial Sequence
  Bisulfite Padlock Probe
  misc_feature 92, 93, 94, 95, 96, 97: n = A,T,C or G
gactggaagagcactgttctcccacccgctctcaaaaacacacgttggaggctcatcgttcctattcaggcagatgttatcgaggtccgacnnnnnnaaaaacgacaacccgacttactctacaacgatcggatacgcatgaggct

SEQ ID NO: 5675 - DNA, 146 bp, Artificial Sequence
  Bisulfite Padlock Probe
  misc_feature 93, 94, 95, 96, 97, 98: n = A,T,C or G
gactggaagagcactgttctcccacctatcacccccatacaaacgttggaggctcatcgttcctattcaggcagatgttatcgaggtccgacnnnnnncaaaaactaaaactaaaaaccataatcagatcggatacgcatgaggct

SEQ ID NO: 5676 - DNA, 146 bp, Artificial Sequence
  Bisulfite Padlock Probe
  misc_feature 93, 94, 95, 96, 97, 98: n = A,T,C or G
gactggaagagcactgttctcccacctatcacccccatacaaacgttggaggctcatcgttcctattcaggcagatgttatcgaggtccgacnnnnnncaaaaactaaaactaaaaaccgtaatcagatcggatacgcatgaggct

SEQ ID NO: 5677 - DNA, 146 bp, Artificial Sequence
  Bisulfite Padlock Probe
  misc_feature 95, 96, 97, 98, 99, 100: n = A,T,C or G
gactggaagagcactgttctcccccaaaatattacaacaaacaaacgttggaggctcatcgttcctattcaggcagatgttatcgaggtccgacnnnnnnaaataaaactactaccaacaaaacccgatcggatacgcatgaggct

SEQ ID NO: 5678 - DNA, 146 bp, Artificial Sequence
  Bisulfite Padlock Probe
  misc_feature 94, 95, 96, 97, 98, 99: n = A,T,C or G
gactggaagagcactgttctcccccaaaatcctaaccaaaccaaagttggaggctcatcgttcctattcaggcagatgttatcgaggtccgacnnnnnnactaaaacctactataaactacaaatagatcggatacgcatgaggct

SEQ ID NO: 5679 - DNA, 146 bp, Artificial Sequence
  Bisulfite Padlock Probe
  misc_feature 94, 95, 96, 97, 98, 99: n = A,T,C or G
gactggaagagcactgttctcccccaaaatcctaaccaaaccgaagttggaggctcatcgttcctattcaggcagatgttatcgaggtccgacnnnnnnactaaaacctactataaactacaaatagatcggatacgcatgaggct

SEQ ID NO: 5680 - DNA, 146 bp, Artificial Sequence
  Bisulfite Padlock Probe
  misc_feature 95, 96, 97, 98, 99, 100: n = A,T,C or G
gactggaagagcactgttctcccctctccaaaccaaaccttaaattgttggaggctcatcgttcctattcaggcagatgttatcgaggtccgacnnnnnncatccttcctacccaacccccaaaacgatcggatacgcatgaggct

SEQ ID NO: 5681 - DNA, 146 bp, Artificial Sequence
  Bisulfite Padlock Probe
  misc_feature 95, 96, 97, 98, 99, 100: n = A,T,C or G
gactggaagagcactgttctcccctctccaaaccgaaccttaaattgttggaggctcatcgttcctattcaggcagatgttatcgaggtccgacnnnnnncatccttcctacccgacccccaaaacgatcggatacgcatgaggct

SEQ ID NO: 5682 - DNA, 146 bp, Artificial Sequence
  Bisulfite Padlock Probe
  misc_feature 92, 93, 94, 95, 96, 97: n = A,T,C or G
gactggaagagcactgttctcccgccccttatcctacaaaaaagttggaggctcatcgttcctattcaggcagatgttatcgaggtccgacnnnnnntatctattataactcctcccaatcccctcgatcggatacgcatgaggct

SEQ ID NO: 5683 - DNA, 146 bp, Artificial Sequence
  Bisulfite Padlock Probe
  misc_feature 92, 93, 94, 95, 96, 97: n = A,T,C or G
gactggaagagcactgttctcccgccccttatcctacgaaaaagttggaggctcatcgttcctattcaggcagatgttatcgaggtccgacnnnnnntatctattataactcctcccaatcccctcgatcggatacgcatgaggct

SEQ ID NO: 5684 - DNA, 146 bp, Artificial Sequence
  Bisulfite Padlock Probe
  misc_feature 92, 93, 94, 95, 96, 97: n = A,T,C or G
gactggaagagcactgttctccctaaacctctctaaaccaaacgttggaggctcatcgttcctattcaggcagatgttatcgaggtccgacnnnnnncaccgactcaacacatcctacctacaaatgatcggatacgcatgaggct

SEQ ID NO: 5685 - DNA, 146 bp, Artificial Sequence
  Bisulfite Padlock Probe
  misc_feature 92, 93, 94, 95, 96, 97: n = A,T,C or G
gactggaagagcactgttctccctaaacctctctaaaccgaacgttggaggctcatcgttcctattcaggcagatgttatcgaggtccgacnnnnnncaccgactcgacacatcctacctacaaatgatcggatacgcatgaggct

SEQ ID NO: 5686 - DNA, 146 bp, Artificial Sequence
  Bisulfite Padlock Probe
  misc_feature 95, 96, 97, 98, 99, 100: n = A,T,C or G
gactggaagagcactgttctccctaactacctaaacaacttaaaaagttggaggctcatcgttcctattcaggcagatgttatcgaggtccgacnnnnnnaatccacctaaaaccaaaataaatacgatcggatacgcatgaggct

SEQ ID NO: 5687 - DNA, 146 bp, Artificial Sequence
  Bisulfite Padlock Probe
  misc_feature 95, 96, 97, 98, 99, 100: n = A,T,C or G
gactggaagagcactgttctccctaactacctaaacgacttaaaaagttggaggctcatcgttcctattcaggcagatgttatcgaggtccgacnnnnnnaatccacctaaaaccgaaataaatacgatcggatacgcatgaggct

SEQ ID NO: 5688 - DNA, 146 bp, Artificial Sequence
  Bisulfite Padlock Probe
  misc_feature 95, 96, 97, 98, 99, 100: n = A,T,C or G
gactggaagagcactgttctccctaataataatttttaactacttcgttggaggctcatcgttcctattcaggcagatgttatcgaggtccgacnnnnnnaaaaatcccatatatatcctaaaaacgatcggatacgcatgaggct

SEQ ID NO: 5689 - DNA, 146 bp, Artificial Sequence
  Bisulfite Padlock Probe
  misc_feature 95, 96, 97, 98, 99, 100: n = A,T,C or G
gactggaagagcactgttctccctaataataatttttaactacttcgttggaggctcatcgttcctattcaggcagatgttatcgaggtccgacnnnnnnaaaaatcccgtatatatcctaaaaacgatcggatacgcatgaggct

SEQ ID NO: 5690 - DNA, 146 bp, Artificial Sequence
  Bisulfite Padlock Probe
  misc_feature 92, 93, 94, 95, 96, 97: n = A,T,C or G
gactggaagagcactgttctccctaccaccacccaaacaaaaagttggaggctcatcgttcctattcaggcagatgttatcgaggtccgacnnnnnncctctttctctcactctaaccccaaaaccgatcggatacgcatgaggct

SEQ ID NO: 5691 - DNA, 146 bp, Artificial Sequence
  Bisulfite Padlock Probe
  misc_feature 92, 93, 94, 95, 96, 97: n = A,T,C or G
gactggaagagcactgttctccctaccaccacccgaacaaaaagttggaggctcatcgttcctattcaggcagatgttatcgaggtccgacnnnnnncctctttctctcgctctaaccccaaaaccgatcggatacgcatgaggct

SEQ ID NO: 5692 - DNA, 146 bp, Artificial Sequence
  Bisulfite Padlock Probe
  misc_feature 96, 97, 98, 99, 100, 101: n = A,T,C or G
gactggaagagcactgttctccctccttcaaccccaacaaaatttttgttggaggctcatcgttcctattcaggcagatgttatcgaggtccgacnnnnnnaaaaacccgcaacgaaaccaataacgatcggatacgcatgaggct

SEQ ID NO: 5693 - DNA, 146 bp, Artificial Sequence
  Bisulfite Padlock Probe
  misc_feature 96, 97, 98, 99, 100, 101: n = A,T,C or G
gactggaagagcactgttctccctccttcgaccccaacaaaatttttgttggaggctcatcgttcctattcaggcagatgttatcgaggtccgacnnnnnnaaaaacccgcaacgaaaccgataacgatcggatacgcatgaggct

SEQ ID NO: 5694 - DNA, 146 bp, Artificial Sequence
  Bisulfite Padlock Probe
  misc_feature 96, 97, 98, 99, 100, 101: n = A,T,C or G
gactggaagagcactgttctccgaaaaataaatcaacaaattaaaaagttggaggctcatcgttcctattcaggcagatgttatcgaggtccgacnnnnnnaaaaacaaactccctaccataaaaagatcggatacgcatgaggct

SEQ ID NO: 5695 - DNA, 146 bp, Artificial Sequence
  Bisulfite Padlock Probe
  misc_feature 96, 97, 98, 99, 100, 101: n = A,T,C or G
gactggaagagcactgttctccgaaaaataaatcaacgaattaaaaagttggaggctcatcgttcctattcaggcagatgttatcgaggtccgacnnnnnnaaaaacgaactccctaccataaaaagatcggatacgcatgaggct

SEQ ID NO: 5696 - DNA, 146 bp, Artificial Sequence
  Bisulfite Padlock Probe
  misc_feature 95, 96, 97, 98, 99, 100: n = A,T,C or G
gactggaagagcactgttctccgaaaaccgctacaaataaccaaacgttggaggctcatcgttcctattcaggcagatgttatcgaggtccgacnnnnnnttccacaaccccaacacccaataaccgatcggatacgcatgaggct

SEQ ID NO: 5697 - DNA, 146 bp, Artificial Sequence
  Bisulfite Padlock Probe
  misc_feature 95, 96, 97, 98, 99, 100: n = A,T,C or G
gactggaagagcactgttctccgaaaaccgctacgaataaccaaacgttggaggctcatcgttcctattcaggcagatgttatcgaggtccgacnnnnnnttccacaaccccaacacccaataaccgatcggatacgcatgaggct

SEQ ID NO: 5698 - DNA, 146 bp, Artificial Sequence
  Bisulfite Padlock Probe
  misc_feature 92, 93, 94, 95, 96, 97: n = A,T,C or G
gactggaagagcactgttctccgaataaaaactaaaacaacctgttggaggctcatcgttcctattcaggcagatgttatcgaggtccgacnnnnnnaaacaaataccacaaatccaaactactaagatcggatacgcatgaggct

SEQ ID NO: 5699 - DNA, 146 bp, Artificial Sequence
  Bisulfite Padlock Probe
  misc_feature 96, 97, 98, 99, 100, 101: n = A,T,C or G
gactggaagagcactgttctccgaatcaaaactactaacccgaccacgttggaggctcatcgttcctattcaggcagatgttatcgaggtccgacnnnnnntaaaacgcgcgaacaacgcaaacttgatcggatacgcatgaggct

SEQ ID NO: 5700 - DNA, 146 bp, Artificial Sequence
  Bisulfite Padlock Probe
  misc_feature 96, 97, 98, 99, 100, 101: n = A,T,C or G
gactggaagagcactgttctccgaatcaaaactactaacccgaccgcgttggaggctcatcgttcctattcaggcagatgttatcgaggtccgacnnnnnntaaaacgcgcgaacaacgcgaacttgatcggatacgcatgaggct

SEQ ID NO: 5701 - DNA, 146 bp, Artificial Sequence
  Bisulfite Padlock Probe
  misc_feature 96, 97, 98, 99, 100, 101: n = A,T,C or G
gactggaagagcactgttctccgaatctctaccatccacctaaatacgttggaggctcatcgttcctattcaggcagatgttatcgaggtccgacnnnnnnaaaaacccgaacgcgcaactactacgatcggatacgcatgaggct

SEQ ID NO: 5702 - DNA, 146 bp, Artificial Sequence
  Bisulfite Padlock Probe
  misc_feature 96, 97, 98, 99, 100, 101: n = A,T,C or G
gactggaagagcactgttctccgaatctctaccatccgcctaaatacgttggaggctcatcgttcctattcaggcagatgttatcgaggtccgacnnnnnnaaaaacccgaacgcgcgactactacgatcggatacgcatgaggct

SEQ ID NO: 5703 - DNA, 146 bp, Artificial Sequence
  Bisulfite Padlock Probe
  misc_feature 96, 97, 98, 99, 100, 101: n = A,T,C or G
gactggaagagcactgttctccgactaaacgcccaaaaaccaaaaaagttggaggctcatcgttcctattcaggcagatgttatcgaggtccgacnnnnnnactaacaccgacgcaaacctaaaaagatcggatacgcatgaggct

SEQ ID NO: 5704 - DNA, 146 bp, Artificial Sequence
  Bisulfite Padlock Probe
  misc_feature 96, 97, 98, 99, 100, 101: n = A,T,C or G
gactggaagagcactgttctccgactaaacgcccaaaaaccgaaaaagttggaggctcatcgttcctattcaggcagatgttatcgaggtccgacnnnnnnactaacaccgacgcgaacctaaaaagatcggatacgcatgaggct

SEQ ID NO: 5705 - DNA, 146 bp, Artificial Sequence
  Bisulfite Padlock Probe
  misc_feature 95, 96, 97, 98, 99, 100: n = A,T,C or G
gactggaagagcactgttctccgatcgccactaccactactactacgttggaggctcatcgttcctattcaggcagatgttatcgaggtccgacnnnnnncacccacaacgttcacaaacaacaacgatcggatacgcatgaggct

SEQ ID NO: 5706 - DNA, 146 bp, Artificial Sequence
  Bisulfite Padlock Probe
  misc_feature 95, 96, 97, 98, 99, 100: n = A,T,C or G
gactggaagagcactgttctccgatcgccgctaccactactactacgttggaggctcatcgttcctattcaggcagatgttatcgaggtccgacnnnnnncacccacaacgttcacaaacgacaacgatcggatacgcatgaggct

SEQ ID NO: 5707 - DNA, 146 bp, Artificial Sequence
  Bisulfite Padlock Probe
  misc_feature 93, 94, 95, 96, 97, 98: n = A,T,C or G
gactggaagagcactgttctccgcctaaacgaaccaatcacaacgttggaggctcatcgttcctattcaggcagatgttatcgaggtccgacnnnnnngacgacgaaacccaaacatctacccaacgatcggatacgcatgaggct

SEQ ID NO: 5708 - DNA, 146 bp, Artificial Sequence
  Bisulfite Padlock Probe
  misc_feature 93, 94, 95, 96, 97, 98: n = A,T,C or G
gactggaagagcactgttctccgcctaaacgaaccaatcgcaacgttggaggctcatcgttcctattcaggcagatgttatcgaggtccgacnnnnnngacgacgaaacccaaacatctacccgacgatcggatacgcatgaggct

SEQ ID NO: 5709 - DNA, 146 bp, Artificial Sequence
  Bisulfite Padlock Probe
  misc_feature 92, 93, 94, 95, 96, 97: n = A,T,C or G
gactggaagagcactgttctccgtaaccaacccctaaaaatccgttggaggctcatcgttcctattcaggcagatgttatcgaggtccgacnnnnnnaaaaataaatataaaattaaattctttttgatcggatacgcatgaggct

SEQ ID NO: 5710 - DNA, 146 bp, Artificial Sequence
  Bisulfite Padlock Probe
  misc_feature 92, 93, 94, 95, 96, 97: n = A,T,C or G
gactggaagagcactgttctccgtaaccgacccctaaaaatccgttggaggctcatcgttcctattcaggcagatgttatcgaggtccgacnnnnnnaaaaataaatataaaattaaattctttttgatcggatacgcatgaggct

SEQ ID NO: 5711 - DNA, 146 bp, Artificial Sequence
  Bisulfite Padlock Probe
  misc_feature 95, 96, 97, 98, 99, 100: n = A,T,C or G
gactggaagagcactgttctcctaaacactactctaaacatcccccgttggaggctcatcgttcctattcaggcagatgttatcgaggtccgacnnnnnnaactaactacgcacgacaactaaatcgatcggatacgcatgaggct

SEQ ID NO: 5712 - DNA, 146 bp, Artificial Sequence
  Bisulfite Padlock Probe
  misc_feature 95, 96, 97, 98, 99, 100: n = A,T,C or G
gactggaagagcactgttctcctaaacactactctaaacatcccccgttggaggctcatcgttcctattcaggcagatgttatcgaggtccgacnnnnnnaactaactacgcacgacgactaaatcgatcggatacgcatgaggct

SEQ ID NO: 5713 - DNA, 146 bp, Artificial Sequence
  Bisulfite Padlock Probe
  misc_feature 93, 94, 95, 96, 97, 98: n = A,T,C or G
gactggaagagcactgttctcctaactaaacgaccgctatacacgttggaggctcatcgttcctattcaggcagatgttatcgaggtccgacnnnnnncatcgctaactctaaattccgccaaatagatcggatacgcatgaggct

SEQ ID NO: 5714 - DNA, 146 bp, Artificial Sequence
  Bisulfite Padlock Probe
  misc_feature 93, 94, 95, 96, 97, 98: n = A,T,C or G
gactggaagagcactgttctcctaactaaacgaccgctatacgcgttggaggctcatcgttcctattcaggcagatgttatcgaggtccgacnnnnnncatcgctaactctaaattccgccgaatagatcggatacgcatgaggct

SEQ ID NO: 5715 - DNA, 146 bp, Artificial Sequence
  Bisulfite Padlock Probe
  misc_feature 95, 96, 97, 98, 99, 100: n = A,T,C or G
gactggaagagcactgttctcctaactacttttctcctaaatctacgttggaggctcatcgttcctattcaggcagatgttatcgaggtccgacnnnnnnaaaaacaatacgcgcgcatacattaagatcggatacgcatgaggct

SEQ ID NO: 5716 - DNA, 146 bp, Artificial Sequence
  Bisulfite Padlock Probe
  misc_feature 95, 96, 97, 98, 99, 100: n = A,T,C or G
gactggaagagcactgttctcctaactacttttctcctaaatctacgttggaggctcatcgttcctattcaggcagatgttatcgaggtccgacnnnnnnaaaaacaatacgcgcgcatacgttaagatcggatacgcatgaggct

SEQ ID NO: 5717 - DNA, 146 bp, Artificial Sequence
  Bisulfite Padlock Probe
  misc_feature 92, 93, 94, 95, 96, 97: n = A,T,C or G
gactggaagagcactgttctcctaccgaccgcaaacaacttcagttggaggctcatcgttcctattcaggcagatgttatcgaggtccgacnnnnnncaataaaaacctaccccatacaaacaaacgatcggatacgcatgaggct

SEQ ID NO: 5718 - DNA, 146 bp, Artificial Sequence
  Bisulfite Padlock Probe
  misc_feature 92, 93, 94, 95, 96, 97: n = A,T,C or G
gactggaagagcactgttctcctaccgaccgcaaacaacttcggttggaggctcatcgttcctattcaggcagatgttatcgaggtccgacnnnnnncaataaaaacctaccccatacaaacaaacgatcggatacgcatgaggct

SEQ ID NO: 5719 - DNA, 146 bp, Artificial Sequence
  Bisulfite Padlock Probe
  misc_feature 92, 93, 94, 95, 96, 97: n = A,T,C or G
gactggaagagcactgttctcctacgtaaacgcgcaataccccgttggaggctcatcgttcctattcaggcagatgttatcgaggtccgacnnnnnncgaaacccgaaattcgacaccaaaattaagatcggatacgcatgaggct

SEQ ID NO: 5720 - DNA, 146 bp, Artificial Sequence
  Bisulfite Padlock Probe
  misc_feature 92, 93, 94, 95, 96, 97: n = A,T,C or G
gactggaagagcactgttctcctacgtaaacgcgcgataccccgttggaggctcatcgttcctattcaggcagatgttatcgaggtccgacnnnnnncgaaacccgaaattcgacgccaaaattaagatcggatacgcatgaggct

SEQ ID NO: 5721 - DNA, 146 bp, Artificial Sequence
  Bisulfite Padlock Probe
  misc_feature 92, 93, 94, 95, 96, 97: n = A,T,C or G
gactggaagagcactgttctcctactaacactaaaatcaaaaagttggaggctcatcgttcctattcaggcagatgttatcgaggtccgacnnnnnnacgaacacaaaacttccaaccaaaaacccgatcggatacgcatgaggct

SEQ ID NO: 5722 - DNA, 146 bp, Artificial Sequence
  Bisulfite Padlock Probe
  misc_feature 92, 93, 94, 95, 96, 97: n = A,T,C or G
gactggaagagcactgttctcctactaacgctaaaatcaaaaagttggaggctcatcgttcctattcaggcagatgttatcgaggtccgacnnnnnnacgaacacaaaacttccaaccgaaaacccgatcggatacgcatgaggct

SEQ ID NO: 5723 - DNA, 146 bp, Artificial Sequence
  Bisulfite Padlock Probe
  misc_feature 93, 94, 95, 96, 97, 98: n = A,T,C or G
gactggaagagcactgttctcctactacgcacaccatcccaaaagttggaggctcatcgttcctattcaggcagatgttatcgaggtccgacnnnnnnaaactaaacctacgcccaacacctaaacgatcggatacgcatgaggct

SEQ ID NO: 5724 - DNA, 146 bp, Artificial Sequence
  Bisulfite Padlock Probe
  misc_feature 93, 94, 95, 96, 97, 98: n = A,T,C or G
gactggaagagcactgttctcctactacgcgcaccatcccaaaagttggaggctcatcgttcctattcaggcagatgttatcgaggtccgacnnnnnnaaactaaacctacgcccaacgcctaaacgatcggatacgcatgaggct

SEQ ID NO: 5725 - DNA, 146 bp, Artificial Sequence
  Bisulfite Padlock Probe
  misc_feature 94, 95, 96, 97, 98, 99: n = A,T,C or G
gactggaagagcactgttctcctataacaaactaaaacttaacccgttggaggctcatcgttcctattcaggcagatgttatcgaggtccgacnnnnnnaaaaaccgaaccaaaaatcaaaaaccagatcggatacgcatgaggct

SEQ ID NO: 5726 - DNA, 146 bp, Artificial Sequence
  Bisulfite Padlock Probe
  misc_feature 94, 95, 96, 97, 98, 99: n = A,T,C or G
gactggaagagcactgttctcctataacaaactaaaacttaacccgttggaggctcatcgttcctattcaggcagatgttatcgaggtccgacnnnnnnaaaaaccgaaccgaaaatcaaaaaccagatcggatacgcatgaggct

SEQ ID NO: 5727 - DNA, 146 bp, Artificial Sequence
  Bisulfite Padlock Probe
  misc_feature 96, 97, 98, 99, 100, 101: n = A,T,C or G
gactggaagagcactgttctcctccccgcgcttttcaaaatactaacgttggaggctcatcgttcctattcaggcagatgttatcgaggtccgacnnnnnncacgcgcaatttcctctccaaaaaagatcggatacgcatgaggct

SEQ ID NO: 5728 - DNA, 146 bp, Artificial Sequence
  Bisulfite Padlock Probe
  misc_feature 96, 97, 98, 99, 100, 101: n = A,T,C or G
gactggaagagcactgttctcctccccgcgcttttcgaaatactaacgttggaggctcatcgttcctattcaggcagatgttatcgaggtccgacnnnnnncacgcgcaatttcctctccgaaaaagatcggatacgcatgaggct

SEQ ID NO: 5729 - DNA, 146 bp, Artificial Sequence
  Bisulfite Padlock Probe
  misc_feature 96, 97, 98, 99, 100, 101: n = A,T,C or G
gactggaagagcactgttctcctccctcctctcctttctctctaattgttggaggctcatcgttcctattcaggcagatgttatcgaggtccgacnnnnnnaaaaccgcgacactaacctaacaccgatcggatacgcatgaggct

SEQ ID NO: 5730 - DNA, 146 bp, Artificial Sequence
  Bisulfite Padlock Probe
  misc_feature 96, 97, 98, 99, 100, 101: n = A,T,C or G
gactggaagagcactgttctcctccctcctctcctttctctctaattgttggaggctcatcgttcctattcaggcagatgttatcgaggtccgacnnnnnnaaaaccgcgacactaacctaacgccgatcggatacgcatgaggct

SEQ ID NO: 5731 - DNA, 146 bp, Artificial Sequence
  Bisulfite Padlock Probe
  misc_feature 93, 94, 95, 96, 97, 98: n = A,T,C or G
gactggaagagcactgttctcctcctccgctctacaaacaaaaagttggaggctcatcgttcctattcaggcagatgttatcgaggtccgacnnnnnnctacactaaccccaactcaactaactccgatcggatacgcatgaggct

SEQ ID NO: 5732 - DNA, 146 bp, Artificial Sequence
  Bisulfite Padlock Probe
  misc_feature 93, 94, 95, 96, 97, 98: n = A,T,C or G
gactggaagagcactgttctcctcctccgctctacaaacgaaaagttggaggctcatcgttcctattcaggcagatgttatcgaggtccgacnnnnnnctacactaaccccgactcaactaactccgatcggatacgcatgaggct

SEQ ID NO: 5733 - DNA, 146 bp, Artificial Sequence
  Bisulfite Padlock Probe
  misc_feature 96, 97, 98, 99, 100, 101: n = A,T,C or G
gactggaagagcactgttctcctctaacacctaaaccccacttctcagttggaggctcatcgttcctattcaggcagatgttatcgaggtccgacnnnnnnacctcccttcgaaaactacaaccacgatcggatacgcatgaggct

SEQ ID NO: 5734 - DNA, 146 bp, Artificial Sequence
  Bisulfite Padlock Probe
  misc_feature 96, 97, 98, 99, 100, 101: n = A,T,C or G
gactggaagagcactgttctcctctaacacctaaaccccacttctcggttggaggctcatcgttcctattcaggcagatgttatcgaggtccgacnnnnnnacctcccttcgaaaactacaaccgcgatcggatacgcatgaggct

SEQ ID NO: 5735 - DNA, 146 bp, Artificial Sequence
  Bisulfite Padlock Probe
  misc_feature 93, 94, 95, 96, 97, 98: n = A,T,C or G
gactggaagagcactgttctcctctaaccaattaaaatccaaccgttggaggctcatcgttcctattcaggcagatgttatcgaggtccgacnnnnnnaaaatatcaaaacaacccaaaaatatacgatcggatacgcatgaggct

SEQ ID NO: 5736 - DNA, 146 bp, Artificial Sequence
  Bisulfite Padlock Probe
  misc_feature 93, 94, 95, 96, 97, 98: n = A,T,C or G
gactggaagagcactgttctcctctaaccaattaaaatccaaccgttggaggctcatcgttcctattcaggcagatgttatcgaggtccgacnnnnnnaaaatatcaaaacaacccgaaaatatacgatcggatacgcatgaggct

SEQ ID NO: 5737 - DNA, 146 bp, Artificial Sequence
  Bisulfite Padlock Probe
  misc_feature 92, 93, 94, 95, 96, 97: n = A,T,C or G
gactggaagagcactgttctccttcaatttcgctatacaaaacgttggaggctcatcgttcctattcaggcagatgttatcgaggtccgacnnnnnnaatccaaattctcctcccctccaaactacgatcggatacgcatgaggct

SEQ ID NO: 5738 - DNA, 146 bp, Artificial Sequence
  Bisulfite Padlock Probe
  misc_feature 92, 93, 94, 95, 96, 97: n = A,T,C or G
gactggaagagcactgttctccttcaatttcgctatacgaaacgttggaggctcatcgttcctattcaggcagatgttatcgaggtccgacnnnnnnaatccaaattctcctcccctccaaactacgatcggatacgcatgaggct

SEQ ID NO: 5739 - DNA, 146 bp, Artificial Sequence
  Bisulfite Padlock Probe
  misc_feature 94, 95, 96, 97, 98, 99: n = A,T,C or G
gactggaagagcactgttctccttccttacctaaactaaaactacgttggaggctcatcgttcctattcaggcagatgttatcgaggtccgacnnnnnncaaccacccaacctcaacactcatctagatcggatacgcatgaggct

SEQ ID NO: 5740 - DNA, 146 bp, Artificial Sequence
  Bisulfite Padlock Probe
  misc_feature 94, 95, 96, 97, 98, 99: n = A,T,C or G
gactggaagagcactgttctccttctactactctcgctctccaacgttggaggctcatcgttcctattcaggcagatgttatcgaggtccgacnnnnnncaacgaaactaaaaactccaaacaaacgatcggatacgcatgaggct

SEQ ID NO: 5741 - DNA, 146 bp, Artificial Sequence
  Bisulfite Padlock Probe
  misc_feature 94, 95, 96, 97, 98, 99: n = A,T,C or G
gactggaagagcactgttctccttctactactctcgctctccgacgttggaggctcatcgttcctattcaggcagatgttatcgaggtccgacnnnnnncaacgaaactaaaaactccgaacaaacgatcggatacgcatgaggct

SEQ ID NO: 5742 - DNA, 146 bp, Artificial Sequence
  Bisulfite Padlock Probe
  misc_feature 93, 94, 95, 96, 97, 98: n = A,T,C or G
gactggaagagcactgttctcgaaaccgccgaacccaaataaacgttggaggctcatcgttcctattcaggcagatgttatcgaggtccgacnnnnnntattcttacgcacaacaaataacaaaaagatcggatacgcatgaggct

SEQ ID NO: 5743 - DNA, 146 bp, Artificial Sequence
  Bisulfite Padlock Probe
  misc_feature 93, 94, 95, 96, 97, 98: n = A,T,C or G
gactggaagagcactgttctcgaaaccgccgaacccgaataaacgttggaggctcatcgttcctattcaggcagatgttatcgaggtccgacnnnnnntattcttacgcacaacgaataacaaaaagatcggatacgcatgaggct

SEQ ID NO: 5744 - DNA, 146 bp, Artificial Sequence
  Bisulfite Padlock Probe
  misc_feature 92, 93, 94, 95, 96, 97: n = A,T,C or G
gactggaagagcactgttctcgaatacatccactccgcaaaccgttggaggctcatcgttcctattcaggcagatgttatcgaggtccgacnnnnnncttttattccaccaactcaccaaatcctcgatcggatacgcatgaggct

SEQ ID NO: 5745 - DNA, 146 bp, Artificial Sequence
  Bisulfite Padlock Probe
  misc_feature 92, 93, 94, 95, 96, 97: n = A,T,C or G
gactggaagagcactgttctcgaatacatccactccgcgaaccgttggaggctcatcgttcctattcaggcagatgttatcgaggtccgacnnnnnncttttattccaccgactcaccaaatcctcgatcggatacgcatgaggct

SEQ ID NO: 5746 - DNA, 146 bp, Artificial Sequence
  Bisulfite Padlock Probe
  misc_feature 92, 93, 94, 95, 96, 97: n = A,T,C or G
gactggaagagcactgttctcgaccccaacacctctaccaaacgttggaggctcatcgttcctattcaggcagatgttatcgaggtccgacnnnnnncctcgaaataatccaaaaacaacaacaccgatcggatacgcatgaggct

SEQ ID NO: 5747 - DNA, 146 bp, Artificial Sequence
  Bisulfite Padlock Probe
  misc_feature 92, 93, 94, 95, 96, 97: n = A,T,C or G
gactggaagagcactgttctcgaccccaacgcctctaccaaacgttggaggctcatcgttcctattcaggcagatgttatcgaggtccgacnnnnnncctcgaaataatccgaaaacaacaacaccgatcggatacgcatgaggct

SEQ ID NO: 5748 - DNA, 146 bp, Artificial Sequence
  Bisulfite Padlock Probe
  misc_feature 94, 95, 96, 97, 98, 99: n = A,T,C or G
gactggaagagcactgttctcgacccgaataaaacaatataaaaagttggaggctcatcgttcctattcaggcagatgttatcgaggtccgacnnnnnnaaaaacccaaaccaaaccacctttatcgatcggatacgcatgaggct

SEQ ID NO: 5749 - DNA, 146 bp, Artificial Sequence
  Bisulfite Padlock Probe
  misc_feature 94, 95, 96, 97, 98, 99: n = A,T,C or G
gactggaagagcactgttctcgacccgaataaaacgatataaaaagttggaggctcatcgttcctattcaggcagatgttatcgaggtccgacnnnnnnaaaaacccgaaccaaaccacctttatcgatcggatacgcatgaggct

SEQ ID NO: 5750 - DNA, 146 bp, Artificial Sequence
  Bisulfite Padlock Probe
  misc_feature 92, 93, 94, 95, 96, 97: n = A,T,C or G
gactggaagagcactgttctcgactaccgacgcacattcctacgttggaggctcatcgttcctattcaggcagatgttatcgaggtccgacnnnnnnaaaaacaatttaaccacgataataacaatgatcggatacgcatgaggct

SEQ ID NO: 5751 - DNA, 146 bp, Artificial Sequence
  Bisulfite Padlock Probe
  misc_feature 92, 93, 94, 95, 96, 97: n = A,T,C or G
gactggaagagcactgttctcgactaccgacgcgcattcctacgttggaggctcatcgttcctattcaggcagatgttatcgaggtccgacnnnnnnaaaaacaatttaaccacgataataacgatgatcggatacgcatgaggct

SEQ ID NO: 5752 - DNA, 146 bp, Artificial Sequence
  Bisulfite Padlock Probe
  misc_feature 95, 96, 97, 98, 99, 100: n = A,T,C or G
gactggaagagcactgttctcgataacaaactaaataaaaactcccgttggaggctcatcgttcctattcaggcagatgttatcgaggtccgacnnnnnnaccaaatattccaattcgcctccatcgatcggatacgcatgaggct

SEQ ID NO: 5753 - DNA, 146 bp, Artificial Sequence
  Bisulfite Padlock Probe
  misc_feature 95, 96, 97, 98, 99, 100: n = A,T,C or G
gactggaagagcactgttctcgataatctcctaatcctaatcttccgttggaggctcatcgttcctattcaggcagatgttatcgaggtccgacnnnnnnacaaatacctacgtaacgatcaaaccgatcggatacgcatgaggct

SEQ ID NO: 5754 - DNA, 146 bp, Artificial Sequence
  Bisulfite Padlock Probe
  misc_feature 94, 95, 96, 97, 98, 99: n = A,T,C or G
gactggaagagcactgttctcgcaacctactcctatcacccctacgttggaggctcatcgttcctattcaggcagatgttatcgaggtccgacnnnnnnaactaatacgcacttccgcactcttctgatcggatacgcatgaggct

SEQ ID NO: 5755 - DNA, 146 bp, Artificial Sequence
  Bisulfite Padlock Probe
  misc_feature 92, 93, 94, 95, 96, 97: n = A,T,C or G
gactggaagagcactgttctcgccaccacgaaaactcaaaaaagttggaggctcatcgttcctattcaggcagatgttatcgaggtccgacnnnnnncacccttaccgaccgaaacaaacaaaaacgatcggatacgcatgaggct

SEQ ID NO: 5756 - DNA, 146 bp, Artificial Sequence
  Bisulfite Padlock Probe
  misc_feature 92, 93, 94, 95, 96, 97: n = A,T,C or G
gactggaagagcactgttctcgccaccacgaaaactcgaaaaagttggaggctcatcgttcctattcaggcagatgttatcgaggtccgacnnnnnncacccttaccgaccgaaacgaacaaaaacgatcggatacgcatgaggct

SEQ ID NO: 5757 - DNA, 146 bp, Artificial Sequence
  Bisulfite Padlock Probe
  misc_feature 94, 95, 96, 97, 98, 99: n = A,T,C or G
gactggaagagcactgttctcgccctacaacgtctaccaaaacacgttggaggctcatcgttcctattcaggcagatgttatcgaggtccgacnnnnnntcttcaactccataaacccgctatcatgatcggatacgcatgaggct

SEQ ID NO: 5758 - DNA, 146 bp, Artificial Sequence
  Bisulfite Padlock Probe
  misc_feature 94, 95, 96, 97, 98, 99: n = A,T,C or G
gactggaagagcactgttctcgccctacaacgtctaccgaaacacgttggaggctcatcgttcctattcaggcagatgttatcgaggtccgacnnnnnntcttcaactccataaacccgctatcgtgatcggatacgcatgaggct

SEQ ID NO: 5759 - DNA, 146 bp, Artificial Sequence
  Bisulfite Padlock Probe
  misc_feature 94, 95, 96, 97, 98, 99: n = A,T,C or G
gactggaagagcactgttctcgcgacctactcctatcacccctacgttggaggctcatcgttcctattcaggcagatgttatcgaggtccgacnnnnnnaactaatacgcacttccgcgctcttctgatcggatacgcatgaggct

SEQ ID NO: 5760 - DNA, 146 bp, Artificial Sequence
  Bisulfite Padlock Probe
  misc_feature 94, 95, 96, 97, 98, 99: n = A,T,C or G
gactggaagagcactgttctcgtacgaaaccactacccaaataccgttggaggctcatcgttcctattcaggcagatgttatcgaggtccgacnnnnnnaccaaaaacctaaacgtccactaaaaagatcggatacgcatgaggct

SEQ ID NO: 5761 - DNA, 146 bp, Artificial Sequence
  Bisulfite Padlock Probe
  misc_feature 94, 95, 96, 97, 98, 99: n = A,T,C or G
gactggaagagcactgttctcgtacgaaaccgctacccaaataccgttggaggctcatcgttcctattcaggcagatgttatcgaggtccgacnnnnnnaccaaaaacctaaacgtccgctaaaaagatcggatacgcatgaggct

SEQ ID NO: 5762 - DNA, 146 bp, Artificial Sequence
  Bisulfite Padlock Probe
  misc_feature 96, 97, 98, 99, 100, 101: n = A,T,C or G
gactggaagagcactgttctcgtcccacacattattctaacccaaaagttggaggctcatcgttcctattcaggcagatgttatcgaggtccgacnnnnnnctaaaacgcaaccccttcactcctcgatcggatacgcatgaggct

SEQ ID NO: 5763 - DNA, 146 bp, Artificial Sequence
  Bisulfite Padlock Probe
  misc_feature 96, 97, 98, 99, 100, 101: n = A,T,C or G
gactggaagagcactgttctcgtcccgcacattattctaacccaaaagttggaggctcatcgttcctattcaggcagatgttatcgaggtccgacnnnnnnctaaaacgcaaccccttcgctcctcgatcggatacgcatgaggct

SEQ ID NO: 5764 - DNA, 146 bp, Artificial Sequence
  Bisulfite Padlock Probe
  misc_feature 94, 95, 96, 97, 98, 99: n = A,T,C or G
gactggaagagcactgttctcgtccttcacaacctcaaccaaactgttggaggctcatcgttcctattcaggcagatgttatcgaggtccgacnnnnnnaattcccaacgtaacgaaacgcaaaccgatcggatacgcatgaggct

SEQ ID NO: 5765 - DNA, 146 bp, Artificial Sequence
  Bisulfite Padlock Probe
  misc_feature 94, 95, 96, 97, 98, 99: n = A,T,C or G
gactggaagagcactgttctcgtccttcgcaacctcaaccaaactgttggaggctcatcgttcctattcaggcagatgttatcgaggtccgacnnnnnnaattcccaacgtaacgaaacgcgaaccgatcggatacgcatgaggct

SEQ ID NO: 5766 - DNA, 146 bp, Artificial Sequence
  Bisulfite Padlock Probe
  misc_feature 92, 93, 94, 95, 96, 97: n = A,T,C or G
gactggaagagcactgttctctaaaaacccaaaacaaccaaacgttggaggctcatcgttcctattcaggcagatgttatcgaggtccgacnnnnnnccctaatccacccaaaaacccctaaaacagatcggatacgcatgaggct

SEQ ID NO: 5767 - DNA, 146 bp, Artificial Sequence
  Bisulfite Padlock Probe
  misc_feature 92, 93, 94, 95, 96, 97: n = A,T,C or G
gactggaagagcactgttctctaaaaacccgaaacaaccaaacgttggaggctcatcgttcctattcaggcagatgttatcgaggtccgacnnnnnnccctaatccacccaaaaacccctaaaacagatcggatacgcatgaggct

SEQ ID NO: 5768 - DNA, 146 bp, Artificial Sequence
  Bisulfite Padlock Probe
  misc_feature 96, 97, 98, 99, 100, 101: n = A,T,C or G
gactggaagagcactgttctctaaaccgaaaccaacgcaacactctagttggaggctcatcgttcctattcaggcagatgttatcgaggtccgacnnnnnnaaaaacgttccaaccgaatcccaccgatcggatacgcatgaggct

SEQ ID NO: 5769 - DNA, 146 bp, Artificial Sequence
  Bisulfite Padlock Probe
  misc_feature 96, 97, 98, 99, 100, 101: n = A,T,C or G
gactggaagagcactgttctctaaaccgaaaccaacgcaacgctctagttggaggctcatcgttcctattcaggcagatgttatcgaggtccgacnnnnnnaaaaacgttccaaccgaatcccgccgatcggatacgcatgaggct

SEQ ID NO: 5770 - DNA, 146 bp, Artificial Sequence
  Bisulfite Padlock Probe
  misc_feature 93, 94, 95, 96, 97, 98: n = A,T,C or G
gactggaagagcactgttctctaaaccgacgaacccacaaaaatgttggaggctcatcgttcctattcaggcagatgttatcgaggtccgacnnnnnncctaaataaccctaaacctactccaaacgatcggatacgcatgaggct

SEQ ID NO: 5771 - DNA, 146 bp, Artificial Sequence
  Bisulfite Padlock Probe
  misc_feature 93, 94, 95, 96, 97, 98: n = A,T,C or G
gactggaagagcactgttctctaaaccgacgaacccgcaaaaatgttggaggctcatcgttcctattcaggcagatgttatcgaggtccgacnnnnnncctaaataaccctaaacctactccgaacgatcggatacgcatgaggct

SEQ ID NO: 5772 - DNA, 146 bp, Artificial Sequence
  Bisulfite Padlock Probe
  misc_feature 96, 97, 98, 99, 100, 101: n = A,T,C or G
gactggaagagcactgttctctaaaccttcaacgctaactcacactcgttggaggctcatcgttcctattcaggcagatgttatcgaggtccgacnnnnnnaactcccgaactcaaacgaaacaacgatcggatacgcatgaggct

SEQ ID NO: 5773 - DNA, 146 bp, Artificial Sequence
  Bisulfite Padlock Probe
  misc_feature 96, 97, 98, 99, 100, 101: n = A,T,C or G
gactggaagagcactgttctctaaaccttcaacgctaactcacgctcgttggaggctcatcgttcctattcaggcagatgttatcgaggtccgacnnnnnnaactcccgaactcaaacgaaacgacgatcggatacgcatgaggct

SEQ ID NO: 5774 - DNA, 146 bp, Artificial Sequence
  Bisulfite Padlock Probe
  misc_feature 94, 95, 96, 97, 98, 99: n = A,T,C or G
gactggaagagcactgttctctaaactcaacccccgaacctcatcgttggaggctcatcgttcctattcaggcagatgttatcgaggtccgacnnnnnnaaaaatctcccctacctctctacccccgatcggatacgcatgaggct

SEQ ID NO: 5775 - DNA, 146 bp, Artificial Sequence
  Bisulfite Padlock Probe
  misc_feature 94, 95, 96, 97, 98, 99: n = A,T,C or G
gactggaagagcactgttctctaaactcaacccccgaacctcgtcgttggaggctcatcgttcctattcaggcagatgttatcgaggtccgacnnnnnnaaaaatctcccctacctctctacccccgatcggatacgcatgaggct

SEQ ID NO: 5776 - DNA, 146 bp, Artificial Sequence
  Bisulfite Padlock Probe
  misc_feature 94, 95, 96, 97, 98, 99: n = A,T,C or G
gactggaagagcactgttctctaacacctaaaaaccaatacaaacgttggaggctcatcgttcctattcaggcagatgttatcgaggtccgacnnnnnnccttcttccccaataatcaaaacaaccgatcggatacgcatgaggct

SEQ ID NO: 5777 - DNA, 146 bp, Artificial Sequence
  Bisulfite Padlock Probe
  misc_feature 94, 95, 96, 97, 98, 99: n = A,T,C or G
gactggaagagcactgttctctaacacctaaaaaccgatacaaacgttggaggctcatcgttcctattcaggcagatgttatcgaggtccgacnnnnnnccttcttccccgataatcaaaacaaccgatcggatacgcatgaggct

SEQ ID NO: 5778 - DNA, 146 bp, Artificial Sequence
  Bisulfite Padlock Probe
  misc_feature 94, 95, 96, 97, 98, 99: n = A,T,C or G
gactggaagagcactgttctctaacccccgcgataacaacaaatcgttggaggctcatcgttcctattcaggcagatgttatcgaggtccgacnnnnnnaaatccgactccttaccctccaaaaaagatcggatacgcatgaggct

SEQ ID NO: 5779 - DNA, 146 bp, Artificial Sequence
  Bisulfite Padlock Probe
  misc_feature 94, 95, 96, 97, 98, 99: n = A,T,C or G
gactggaagagcactgttctctaacccccgcgataacaacgaatcgttggaggctcatcgttcctattcaggcagatgttatcgaggtccgacnnnnnnaaatccgactccttaccctccgaaaaagatcggatacgcatgaggct

SEQ ID NO: 5780 - DNA, 146 bp, Artificial Sequence
  Bisulfite Padlock Probe
  misc_feature 92, 93, 94, 95, 96, 97: n = A,T,C or G
gactggaagagcactgttctctacacctctcctccccaaccacgttggaggctcatcgttcctattcaggcagatgttatcgaggtccgacnnnnnntaataataacaacaaatatcccccaccccgatcggatacgcatgaggct

SEQ ID NO: 5781 - DNA, 146 bp, Artificial Sequence
  Bisulfite Padlock Probe
  misc_feature 92, 93, 94, 95, 96, 97: n = A,T,C or G
gactggaagagcactgttctctacacctctcctccccgaccacgttggaggctcatcgttcctattcaggcagatgttatcgaggtccgacnnnnnntaataataacaacgaatatcccccaccccgatcggatacgcatgaggct

SEQ ID NO: 5782 - DNA, 146 bp, Artificial Sequence
  Bisulfite Padlock Probe
  misc_feature 96, 97, 98, 99, 100, 101: n = A,T,C or G
gactggaagagcactgttctctaccgaatccgaaaccatcaaaacccgttggaggctcatcgttcctattcaggcagatgttatcgaggtccgacnnnnnnaccgaacgatcccaacatatcaaccgatcggatacgcatgaggct

SEQ ID NO: 5783 - DNA, 146 bp, Artificial Sequence
  Bisulfite Padlock Probe
  misc_feature 96, 97, 98, 99, 100, 101: n = A,T,C or G
gactggaagagcactgttctctaccgaatccgaaaccatcgaaacccgttggaggctcatcgttcctattcaggcagatgttatcgaggtccgacnnnnnnaccgaacgatcccaacatatcgaccgatcggatacgcatgaggct

SEQ ID NO: 5784 - DNA, 146 bp, Artificial Sequence
  Bisulfite Padlock Probe
  misc_feature 94, 95, 96, 97, 98, 99: n = A,T,C or G
gactggaagagcactgttctctatcgccataacaaccaaaaactcgttggaggctcatcgttcctattcaggcagatgttatcgaggtccgacnnnnnncctcaatcaaaaaccgaccctaccatcgatcggatacgcatgaggct

SEQ ID NO: 5785 - DNA, 146 bp, Artificial Sequence
  Bisulfite Padlock Probe
  misc_feature 94, 95, 96, 97, 98, 99: n = A,T,C or G
gactggaagagcactgttctctatcgccataacaaccgaaaactcgttggaggctcatcgttcctattcaggcagatgttatcgaggtccgacnnnnnncctcaatcaaaaaccgaccctaccgtcgatcggatacgcatgaggct

SEQ ID NO: 5786 - DNA, 146 bp, Artificial Sequence
  Bisulfite Padlock Probe
  misc_feature 92, 93, 94, 95, 96, 97: n = A,T,C or G
gactggaagagcactgttctctcaaccccacaaaaactacaaagttggaggctcatcgttcctattcaggcagatgttatcgaggtccgacnnnnnnacttaacgcgacaactaacaacaacctaagatcggatacgcatgaggct

SEQ ID NO: 5787 - DNA, 146 bp, Artificial Sequence
  Bisulfite Padlock Probe
  misc_feature 92, 93, 94, 95, 96, 97: n = A,T,C or G
gactggaagagcactgttctctcaaccccgcaaaaactacaaagttggaggctcatcgttcctattcaggcagatgttatcgaggtccgacnnnnnnacttaacgcgacaactaacaacgacctaagatcggatacgcatgaggct

SEQ ID NO: 5788 - DNA, 146 bp, Artificial Sequence
  Bisulfite Padlock Probe
  misc_feature 92, 93, 94, 95, 96, 97: n = A,T,C or G
gactggaagagcactgttctctccaaaaccactactcaaaaccgttggaggctcatcgttcctattcaggcagatgttatcgaggtccgacnnnnnnaaaataataaaacctcataacctaaaaccgatcggatacgcatgaggct

SEQ ID NO: 5789 - DNA, 146 bp, Artificial Sequence
  Bisulfite Padlock Probe
  misc_feature 94, 95, 96, 97, 98, 99: n = A,T,C or G
gactggaagagcactgttctctccaatccctataccatctccaccgttggaggctcatcgttcctattcaggcagatgttatcgaggtccgacnnnnnnaaaataaccgaacctcctcaaaacctcgatcggatacgcatgaggct

SEQ ID NO: 5790 - DNA, 146 bp, Artificial Sequence
  Bisulfite Padlock Probe
  misc_feature 94, 95, 96, 97, 98, 99: n = A,T,C or G
gactggaagagcactgttctctccaatccctataccgtctccaccgttggaggctcatcgttcctattcaggcagatgttatcgaggtccgacnnnnnnaaaataaccgaacctcctcgaaacctcgatcggatacgcatgaggct

SEQ ID NO: 5791 - DNA, 146 bp, Artificial Sequence
  Bisulfite Padlock Probe
  misc_feature 92, 93, 94, 95, 96, 97: n = A,T,C or G
gactggaagagcactgttctctcccgaaacgaccttcacctacgttggaggctcatcgttcctattcaggcagatgttatcgaggtccgacnnnnnnaaaaacccgaaaaaccgcgaattaaaccagatcggatacgcatgaggct

SEQ ID NO: 5792 - DNA, 146 bp, Artificial Sequence
  Bisulfite Padlock Probe
  misc_feature 92, 93, 94, 95, 96, 97: n = A,T,C or G
gactggaagagcactgttctctcccgaaacgaccttcgcctacgttggaggctcatcgttcctattcaggcagatgttatcgaggtccgacnnnnnnaaaaacccgaaaaaccgcgaattaaaccggatcggatacgcatgaggct

SEQ ID NO: 5793 - DNA, 146 bp, Artificial Sequence
  Bisulfite Padlock Probe
  misc_feature 92, 93, 94, 95, 96, 97: n = A,T,C or G
gactggaagagcactgttctctccctccaccacctcctcctacgttggaggctcatcgttcctattcaggcagatgttatcgaggtccgacnnnnnncctaaaactccgaactaaaaacaacctccgatcggatacgcatgaggct

SEQ ID NO: 5794 - DNA, 146 bp, Artificial Sequence
  Bisulfite Padlock Probe
  misc_feature 92, 93, 94, 95, 96, 97: n = A,T,C or G
gactggaagagcactgttctctccctccaccacctcctcctacgttggaggctcatcgttcctattcaggcagatgttatcgaggtccgacnnnnnncctaaaactccgaactaaaaacgacctccgatcggatacgcatgaggct

SEQ ID NO: 5795 - DNA, 146 bp, Artificial Sequence
  Bisulfite Padlock Probe
  misc_feature 92, 93, 94, 95, 96, 97: n = A,T,C or G
gactggaagagcactgttctctccgaaaccactactcaaaaccgttggaggctcatcgttcctattcaggcagatgttatcgaggtccgacnnnnnnaaaataataaaacctcataacctaaaaccgatcggatacgcatgaggct

SEQ ID NO: 5796 - DNA, 146 bp, Artificial Sequence
  Bisulfite Padlock Probe
  misc_feature 92, 93, 94, 95, 96, 97: n = A,T,C or G
gactggaagagcactgttctctcgtccacacaacccttaccacgttggaggctcatcgttcctattcaggcagatgttatcgaggtccgacnnnnnnccttacactacgaacaacactaactcatagatcggatacgcatgaggct

SEQ ID NO: 5797 - DNA, 146 bp, Artificial Sequence
  Bisulfite Padlock Probe
  misc_feature 92, 93, 94, 95, 96, 97: n = A,T,C or G
gactggaagagcactgttctctcgtccacgcaacccttaccacgttggaggctcatcgttcctattcaggcagatgttatcgaggtccgacnnnnnnccttacactacgaacaacactaactcgtagatcggatacgcatgaggct

SEQ ID NO: 5798 - DNA, 146 bp, Artificial Sequence
  Bisulfite Padlock Probe
  misc_feature 93, 94, 95, 96, 97, 98: n = A,T,C or G
gactggaagagcactgttctctctaaaacaacccaaatcaaaacgttggaggctcatcgttcctattcaggcagatgttatcgaggtccgacnnnnnncccaaacgccactaaacaaaacctcaaagatcggatacgcatgaggct

SEQ ID NO: 5799 - DNA, 146 bp, Artificial Sequence
  Bisulfite Padlock Probe
  misc_feature 93, 94, 95, 96, 97, 98: n = A,T,C or G
gactggaagagcactgttctctctaaaacaacccaaatcgaaacgttggaggctcatcgttcctattcaggcagatgttatcgaggtccgacnnnnnncccaaacgccactaaacgaaacctcaaagatcggatacgcatgaggct

SEQ ID NO: 5800 - DNA, 146 bp, Artificial Sequence
  Bisulfite Padlock Probe
  misc_feature 94, 95, 96, 97, 98, 99: n = A,T,C or G
gactggaagagcactgttctctctactacctattaaaatctcactgttggaggctcatcgttcctattcaggcagatgttatcgaggtccgacnnnnnnctccaaaccgttctctaatttttccaagatcggatacgcatgaggct

SEQ ID NO: 5801 - DNA, 146 bp, Artificial Sequence
  Bisulfite Padlock Probe
  misc_feature 94, 95, 96, 97, 98, 99: n = A,T,C or G
gactggaagagcactgttctctctactacctattaaaatctcactgttggaggctcatcgttcctattcaggcagatgttatcgaggtccgacnnnnnnctccaaaccgttctctaatttttccgagatcggatacgcatgaggct

SEQ ID NO: 5802 - DNA, 146 bp, Artificial Sequence
  Bisulfite Padlock Probe
  misc_feature 96, 97, 98, 99, 100, 101: n = A,T,C or G
gactggaagagcactgttctctctccctccttaactcctcccaacacgttggaggctcatcgttcctattcaggcagatgttatcgaggtccgacnnnnnnactccctacaaaacctactaactccgatcggatacgcatgaggct

SEQ ID NO: 5803 - DNA, 146 bp, Artificial Sequence
  Bisulfite Padlock Probe
  misc_feature 93, 94, 95, 96, 97, 98: n = A,T,C or G
gactggaagagcactgttctcttccgaatcgaccaaaataaaaagttggaggctcatcgttcctattcaggcagatgttatcgaggtccgacnnnnnncctattacacttattaaaaaccactattgatcggatacgcatgaggct

SEQ ID NO: 5804 - DNA, 146 bp, Artificial Sequence
  Bisulfite Padlock Probe
  misc_feature 93, 94, 95, 96, 97, 98: n = A,T,C or G
gactggaagagcactgttctcttccgaatcgaccgaaataaaaagttggaggctcatcgttcctattcaggcagatgttatcgaggtccgacnnnnnncctattacacttattaaaaaccgctattgatcggatacgcatgaggct

SEQ ID NO: 5805 - DNA, 146 bp, Artificial Sequence
  Bisulfite Padlock Probe
  misc_feature 93, 94, 95, 96, 97, 98: n = A,T,C or G
gactggaagagcactgttctcttcttctccacattcttaataacgttggaggctcatcgttcctattcaggcagatgttatcgaggtccgacnnnnnnctaacaaacgaaaatacaaacatacaccgatcggatacgcatgaggct

SEQ ID NO: 5806 - DNA, 146 bp, Artificial Sequence
  Bisulfite Padlock Probe
  misc_feature 93, 94, 95, 96, 97, 98: n = A,T,C or G
gactggaagagcactgttctcttcttctccacgttcttaataacgttggaggctcatcgttcctattcaggcagatgttatcgaggtccgacnnnnnnctaacaaacgaaaatacaaacatacgccgatcggatacgcatgaggct

SEQ ID NO: 5807 - DNA, 146 bp, Artificial Sequence
  Bisulfite Padlock Probe
  misc_feature 96, 97, 98, 99, 100, 101: n = A,T,C or G
gactggaagagcactgttcttaaaaacaacgaaaaaccgcattaacagttggaggctcatcgttcctattcaggcagatgttatcgaggtccgacnnnnnnccgtcgtccgaaaacccgtaaaacagatcggatacgcatgaggct

SEQ ID NO: 5808 - DNA, 146 bp, Artificial Sequence
  Bisulfite Padlock Probe
  misc_feature 96, 97, 98, 99, 100, 101: n = A,T,C or G
gactggaagagcactgttcttaaaaacaacgaaaaaccgcgttaacagttggaggctcatcgttcctattcaggcagatgttatcgaggtccgacnnnnnnccgtcgtccgaaaacccgtaaaacggatcggatacgcatgaggct

SEQ ID NO: 5809 - DNA, 146 bp, Artificial Sequence
  Bisulfite Padlock Probe
  misc_feature 93, 94, 95, 96, 97, 98: n = A,T,C or G
gactggaagagcactgttcttaaaaacgcccaaaaaatctaaaagttggaggctcatcgttcctattcaggcagatgttatcgaggtccgacnnnnnncaaaaactccaacgtcaccaataaaaccgatcggatacgcatgaggct

SEQ ID NO: 5810 - DNA, 146 bp, Artificial Sequence
  Bisulfite Padlock Probe
  misc_feature 93, 94, 95, 96, 97, 98: n = A,T,C or G
gactggaagagcactgttcttaaaaacgcccgaaaaatctaaaagttggaggctcatcgttcctattcaggcagatgttatcgaggtccgacnnnnnncaaaaactccaacgtcgccaataaaaccgatcggatacgcatgaggct

SEQ ID NO: 5811 - DNA, 146 bp, Artificial Sequence
  Bisulfite Padlock Probe
  misc_feature 96, 97, 98, 99, 100, 101: n = A,T,C or G
gactggaagagcactgttcttaaaacccaaacctactcctcacttccgttggaggctcatcgttcctattcaggcagatgttatcgaggtccgacnnnnnnaacaaccaaaaaccctacaaaaatcgatcggatacgcatgaggct

SEQ ID NO: 5812 - DNA, 146 bp, Artificial Sequence
  Bisulfite Padlock Probe
  misc_feature 96, 97, 98, 99, 100, 101: n = A,T,C or G
gactggaagagcactgttcttaaaacccaaacctactcctcacttccgttggaggctcatcgttcctattcaggcagatgttatcgaggtccgacnnnnnnaacaaccgaaaaccctacaaaaatcgatcggatacgcatgaggct

SEQ ID NO: 5813 - DNA, 146 bp, Artificial Sequence
  Bisulfite Padlock Probe
  misc_feature 94, 95, 96, 97, 98, 99: n = A,T,C or G
gactggaagagcactgttcttaaaacccgacaacctaacactaacgttggaggctcatcgttcctattcaggcagatgttatcgaggtccgacnnnnnnaacacactcacctacttcatactactagatcggatacgcatgaggct

SEQ ID NO: 5814 - DNA, 146 bp, Artificial Sequence
  Bisulfite Padlock Probe
  misc_feature 94, 95, 96, 97, 98, 99: n = A,T,C or G
gactggaagagcactgttcttaaaacccgacaacctaacgctaacgttggaggctcatcgttcctattcaggcagatgttatcgaggtccgacnnnnnnaacacactcacctacttcgtactactagatcggatacgcatgaggct

SEQ ID NO: 5815 - DNA, 146 bp, Artificial Sequence
  Bisulfite Padlock Probe
  misc_feature 92, 93, 94, 95, 96, 97: n = A,T,C or G
gactggaagagcactgttcttaaaactaaaaccaccaaaaatagttggaggctcatcgttcctattcaggcagatgttatcgaggtccgacnnnnnnactacaactacaatccataaatctaaaccgatcggatacgcatgaggct

SEQ ID NO: 5816 - DNA, 146 bp, Artificial Sequence
  Bisulfite Padlock Probe
  misc_feature 92, 93, 94, 95, 96, 97: n = A,T,C or G
gactggaagagcactgttcttaaaactaaaaccgccaaaaatagttggaggctcatcgttcctattcaggcagatgttatcgaggtccgacnnnnnnactacaactacaatccgtaaatctaaaccgatcggatacgcatgaggct

SEQ ID NO: 5817 - DNA, 146 bp, Artificial Sequence
  Bisulfite Padlock Probe
  misc_feature 96, 97, 98, 99, 100, 101: n = A,T,C or G
gactggaagagcactgttcttaaaacttaaaaatcaacttcctaaaagttggaggctcatcgttcctattcaggcagatgttatcgaggtccgacnnnnnncatccctccaccctcccaaattaccgatcggatacgcatgaggct

SEQ ID NO: 5818 - DNA, 146 bp, Artificial Sequence
  Bisulfite Padlock Probe
  misc_feature 96, 97, 98, 99, 100, 101: n = A,T,C or G
gactggaagagcactgttcttaaaacttaaaaatcaacttcctaaaagttggaggctcatcgttcctattcaggcagatgttatcgaggtccgacnnnnnncatccctccaccctcccgaattaccgatcggatacgcatgaggct

SEQ ID NO: 5819 - DNA, 146 bp, Artificial Sequence
  Bisulfite Padlock Probe
  misc_feature 94, 95, 96, 97, 98, 99: n = A,T,C or G
gactggaagagcactgttcttaaaattaaatcttcacaatacctagttggaggctcatcgttcctattcaggcagatgttatcgaggtccgacnnnnnnccctcgtcgtctcccaactaacaaaaagatcggatacgcatgaggct

SEQ ID NO: 5820 - DNA, 146 bp, Artificial Sequence
  Bisulfite Padlock Probe
  misc_feature 94, 95, 96, 97, 98, 99: n = A,T,C or G
gactggaagagcactgttcttaaaattaaatcttcgcaatacctagttggaggctcatcgttcctattcaggcagatgttatcgaggtccgacnnnnnnccctcgtcgtctcccgactaacaaaaagatcggatacgcatgaggct

SEQ ID NO: 5821 - DNA, 146 bp, Artificial Sequence
  Bisulfite Padlock Probe
  misc_feature 94, 95, 96, 97, 98, 99: n = A,T,C or G
gactggaagagcactgttcttaaaccctaacaccgactcactccagttggaggctcatcgttcctattcaggcagatgttatcgaggtccgacnnnnnnaaaaacaaaataacctctaataaatccgatcggatacgcatgaggct

SEQ ID NO: 5822 - DNA, 146 bp, Artificial Sequence
  Bisulfite Padlock Probe
  misc_feature 94, 95, 96, 97, 98, 99: n = A,T,C or G
gactggaagagcactgttcttaaaccctaacaccgactcgctccagttggaggctcatcgttcctattcaggcagatgttatcgaggtccgacnnnnnnaaaaacaaaataacctctaataaatccgatcggatacgcatgaggct

SEQ ID NO: 5823 - DNA, 146 bp, Artificial Sequence
  Bisulfite Padlock Probe
  misc_feature 94, 95, 96, 97, 98, 99: n = A,T,C or G
gactggaagagcactgttcttaaacgaacacttttctaaaacaacgttggaggctcatcgttcctattcaggcagatgttatcgaggtccgacnnnnnnaaccgcactcctaaacgaaccaaaaaagatcggatacgcatgaggct

SEQ ID NO: 5824 - DNA, 146 bp, Artificial Sequence
  Bisulfite Padlock Probe
  misc_feature 94, 95, 96, 97, 98, 99: n = A,T,C or G
gactggaagagcactgttcttaaacgaacgcttttctaaaacaacgttggaggctcatcgttcctattcaggcagatgttatcgaggtccgacnnnnnnaaccgcactcctaaacgaaccgaaaaagatcggatacgcatgaggct

SEQ ID NO: 5825 - DNA, 146 bp, Artificial Sequence
  Bisulfite Padlock Probe
  misc_feature 92, 93, 94, 95, 96, 97: n = A,T,C or G
gactggaagagcactgttcttaaacgccgactcaaaaactatcgttggaggctcatcgttcctattcaggcagatgttatcgaggtccgacnnnnnnatacctactacctcattctccaacaccaagatcggatacgcatgaggct

SEQ ID NO: 5826 - DNA, 146 bp, Artificial Sequence
  Bisulfite Padlock Probe
  misc_feature 92, 93, 94, 95, 96, 97: n = A,T,C or G
gactggaagagcactgttcttaaacgccgactcgaaaactatcgttggaggctcatcgttcctattcaggcagatgttatcgaggtccgacnnnnnnatacctactacctcattctccgacaccaagatcggatacgcatgaggct

SEQ ID NO: 5827 - DNA, 146 bp, Artificial Sequence
  Bisulfite Padlock Probe
  misc_feature 94, 95, 96, 97, 98, 99: n = A,T,C or G
gactggaagagcactgttcttaaatacaaacaattaaaaccaaacgttggaggctcatcgttcctattcaggcagatgttatcgaggtccgacnnnnnnaacaaaaacgcaccaaaaatacaaaaagatcggatacgcatgaggct

SEQ ID NO: 5828 - DNA, 146 bp, Artificial Sequence
  Bisulfite Padlock Probe
  misc_feature 94, 95, 96, 97, 98, 99: n = A,T,C or G
gactggaagagcactgttcttaaatacgaacaattaaaaccaaacgttggaggctcatcgttcctattcaggcagatgttatcgaggtccgacnnnnnnaacaaaaacgcgccaaaaatacaaaaagatcggatacgcatgaggct

SEQ ID NO: 5829 - DNA, 146 bp, Artificial Sequence
  Bisulfite Padlock Probe
  misc_feature 92, 93, 94, 95, 96, 97: n = A,T,C or G
gactggaagagcactgttcttaacaaactcctctcaaatctccgttggaggctcatcgttcctattcaggcagatgttatcgaggtccgacnnnnnnacgaaaaataaccaaaacctactactcccgatcggatacgcatgaggct

SEQ ID NO: 5830 - DNA, 146 bp, Artificial Sequence
  Bisulfite Padlock Probe
  misc_feature 93, 94, 95, 96, 97, 98: n = A,T,C or G
gactggaagagcactgttcttaacacacttaataacccaaaatcgttggaggctcatcgttcctattcaggcagatgttatcgaggtccgacnnnnnntttctcctacttctcccaaataatttaagatcggatacgcatgaggct

SEQ ID NO: 5831 - DNA, 146 bp, Artificial Sequence
  Bisulfite Padlock Probe
  misc_feature 93, 94, 95, 96, 97, 98: n = A,T,C or G
gactggaagagcactgttcttaacacgcttaataacccaaaatcgttggaggctcatcgttcctattcaggcagatgttatcgaggtccgacnnnnnntttctcctacttctcccgaataatttaagatcggatacgcatgaggct

SEQ ID NO: 5832 - DNA, 146 bp, Artificial Sequence
  Bisulfite Padlock Probe
  misc_feature 92, 93, 94, 95, 96, 97: n = A,T,C or G
gactggaagagcactgttcttaaccttaattccaaaccccactgttggaggctcatcgttcctattcaggcagatgttatcgaggtccgacnnnnnntacaatacaaaacataaaaatactaaaccgatcggatacgcatgaggct

SEQ ID NO: 5833 - DNA, 146 bp, Artificial Sequence
  Bisulfite Padlock Probe
  misc_feature 92, 93, 94, 95, 96, 97: n = A,T,C or G
gactggaagagcactgttcttaaccttaattccaaaccccgctgttggaggctcatcgttcctattcaggcagatgttatcgaggtccgacnnnnnntacaatacaaaacataaaaatactaaaccgatcggatacgcatgaggct

SEQ ID NO: 5834 - DNA, 146 bp, Artificial Sequence
  Bisulfite Padlock Probe
  misc_feature 92, 93, 94, 95, 96, 97: n = A,T,C or G
gactggaagagcactgttcttaacgaactcctctcaaatctccgttggaggctcatcgttcctattcaggcagatgttatcgaggtccgacnnnnnnacgaaaaataaccgaaacctactactcccgatcggatacgcatgaggct

SEQ ID NO: 5835 - DNA, 146 bp, Artificial Sequence
  Bisulfite Padlock Probe
  misc_feature 92, 93, 94, 95, 96, 97: n = A,T,C or G
gactggaagagcactgttcttaacgtaaacgcgctcaaccaacgttggaggctcatcgttcctattcaggcagatgttatcgaggtccgacnnnnnnaaaaacctaccaaaaccgtaaaactcactgatcggatacgcatgaggct

SEQ ID NO: 5836 - DNA, 146 bp, Artificial Sequence
  Bisulfite Padlock Probe
  misc_feature 92, 93, 94, 95, 96, 97: n = A,T,C or G
gactggaagagcactgttcttaacgtaaacgcgctcgaccaacgttggaggctcatcgttcctattcaggcagatgttatcgaggtccgacnnnnnnaaaaacctaccaaaaccgtaaaactcgctgatcggatacgcatgaggct

SEQ ID NO: 5837 - DNA, 146 bp, Artificial Sequence
  Bisulfite Padlock Probe
  misc_feature 92, 93, 94, 95, 96, 97: n = A,T,C or G
gactggaagagcactgttcttaactcaaccacttcctctataagttggaggctcatcgttcctattcaggcagatgttatcgaggtccgacnnnnnntcttattcgactacctaaacaaccaaatcgatcggatacgcatgaggct

SEQ ID NO: 5838 - DNA, 146 bp, Artificial Sequence
  Bisulfite Padlock Probe
  misc_feature 92, 93, 94, 95, 96, 97: n = A,T,C or G
gactggaagagcactgttcttaactcaaccacttcctctataagttggaggctcatcgttcctattcaggcagatgttatcgaggtccgacnnnnnntcttattcgactacctaaacgaccaaatcgatcggatacgcatgaggct

SEQ ID NO: 5839 - DNA, 146 bp, Artificial Sequence
  Bisulfite Padlock Probe
  misc_feature 93, 94, 95, 96, 97, 98: n = A,T,C or G
gactggaagagcactgttcttaactctccaatacccataccatagttggaggctcatcgttcctattcaggcagatgttatcgaggtccgacnnnnnnaaactcccaatataaatctctaaacaacgatcggatacgcatgaggct

SEQ ID NO: 5840 - DNA, 146 bp, Artificial Sequence
  Bisulfite Padlock Probe
  misc_feature 96, 97, 98, 99, 100, 101: n = A,T,C or G
gactggaagagcactgttcttaataaaataacaataaaaccaacctcgttggaggctcatcgttcctattcaggcagatgttatcgaggtccgacnnnnnnacatttaacattacttccaaaaatcgatcggatacgcatgaggct

SEQ ID NO: 5841 - DNA, 146 bp, Artificial Sequence
  Bisulfite Padlock Probe
  misc_feature 96, 97, 98, 99, 100, 101: n = A,T,C or G
gactggaagagcactgttcttaataaaataacaataaaaccgacctcgttggaggctcatcgttcctattcaggcagatgttatcgaggtccgacnnnnnnacatttaacgttacttccaaaaatcgatcggatacgcatgaggct

SEQ ID NO: 5842 - DNA, 146 bp, Artificial Sequence
  Bisulfite Padlock Probe
  misc_feature 92, 93, 94, 95, 96, 97: n = A,T,C or G
gactggaagagcactgttcttaatcaaactcaacctttcttaagttggaggctcatcgttcctattcaggcagatgttatcgaggtccgacnnnnnnaatctcctacctatatccaatcctaaaaagatcggatacgcatgaggct

SEQ ID NO: 5843 - DNA, 146 bp, Artificial Sequence
  Bisulfite Padlock Probe
  misc_feature 96, 97, 98, 99, 100, 101: n = A,T,C or G
gactggaagagcactgttcttaccaacactacctaacttaccccttcgttggaggctcatcgttcctattcaggcagatgttatcgaggtccgacnnnnnncaaaaactaaaaacctccacaattcgatcggatacgcatgaggct

SEQ ID NO: 5844 - DNA, 146 bp, Artificial Sequence
  Bisulfite Padlock Probe
  misc_feature 96, 97, 98, 99, 100, 101: n = A,T,C or G
gactggaagagcactgttcttaccaacactacctaacttaccccttcgttggaggctcatcgttcctattcaggcagatgttatcgaggtccgacnnnnnncaaaaactaaaaacctccacgattcgatcggatacgcatgaggct

SEQ ID NO: 5845 - DNA, 146 bp, Artificial Sequence
  Bisulfite Padlock Probe
  misc_feature 93, 94, 95, 96, 97, 98: n = A,T,C or G
gactggaagagcactgttcttaccaataaaacctatcttaaaacgttggaggctcatcgttcctattcaggcagatgttatcgaggtccgacnnnnnnaactcaccttccctcccctacaaaaatcgatcggatacgcatgaggct

SEQ ID NO: 5846 - DNA, 146 bp, Artificial Sequence
  Bisulfite Padlock Probe
  misc_feature 93, 94, 95, 96, 97, 98: n = A,T,C or G
gactggaagagcactgttcttaccaataaaacctatcttaaaacgttggaggctcatcgttcctattcaggcagatgttatcgaggtccgacnnnnnnaactcgccttccctcccctacaaaaatcgatcggatacgcatgaggct

SEQ ID NO: 5847 - DNA, 146 bp, Artificial Sequence
  Bisulfite Padlock Probe
  misc_feature 94, 95, 96, 97, 98, 99: n = A,T,C or G
gactggaagagcactgttcttacctaccttctactcctactactagttggaggctcatcgttcctattcaggcagatgttatcgaggtccgacnnnnnnaaaataaaaacaacctaaatacccccagatcggatacgcatgaggct

SEQ ID NO: 5848 - DNA, 146 bp, Artificial Sequence
  Bisulfite Padlock Probe
  misc_feature 96, 97, 98, 99, 100, 101: n = A,T,C or G
gactggaagagcactgttcttacgcaaaaacacccaaaaccacaaaagttggaggctcatcgttcctattcaggcagatgttatcgaggtccgacnnnnnnaaatctaaaaccgaactacactaacgatcggatacgcatgaggct

SEQ ID NO: 5849 - DNA, 146 bp, Artificial Sequence
  Bisulfite Padlock Probe
  misc_feature 96, 97, 98, 99, 100, 101: n = A,T,C or G
gactggaagagcactgttcttacgcaaaaacacccaaaaccgcaaaagttggaggctcatcgttcctattcaggcagatgttatcgaggtccgacnnnnnnaaatctaaaaccgaactacgctaacgatcggatacgcatgaggct

SEQ ID NO: 5850 - DNA, 146 bp, Artificial Sequence
  Bisulfite Padlock Probe
  misc_feature 92, 93, 94, 95, 96, 97: n = A,T,C or G
gactggaagagcactgttcttataaccaaccccaaattccctcgttggaggctcatcgttcctattcaggcagatgttatcgaggtccgacnnnnnnaaaaataaaccgtaatatcactatacttagatcggatacgcatgaggct

SEQ ID NO: 5851 - DNA, 146 bp, Artificial Sequence
  Bisulfite Padlock Probe
  misc_feature 92, 93, 94, 95, 96, 97: n = A,T,C or G
gactggaagagcactgttcttataaccaaccccgaattccctcgttggaggctcatcgttcctattcaggcagatgttatcgaggtccgacnnnnnnaaaaataaaccgtaatatcgctatacttagatcggatacgcatgaggct

SEQ ID NO: 5852 - DNA, 146 bp, Artificial Sequence
  Bisulfite Padlock Probe
  misc_feature 93, 94, 95, 96, 97, 98: n = A,T,C or G
gactggaagagcactgttcttatataacgacccgcgaacccaaagttggaggctcatcgttcctattcaggcagatgttatcgaggtccgacnnnnnnaaacctccgataaaaccgcaataacaaagatcggatacgcatgaggct

SEQ ID NO: 5853 - DNA, 146 bp, Artificial Sequence
  Bisulfite Padlock Probe
  misc_feature 93, 94, 95, 96, 97, 98: n = A,T,C or G
gactggaagagcactgttcttatataacgacccgcgaacccgaagttggaggctcatcgttcctattcaggcagatgttatcgaggtccgacnnnnnnaaacctccgataaaaccgcgataacaaagatcggatacgcatgaggct

SEQ ID NO: 5854 - DNA, 146 bp, Artificial Sequence
  Bisulfite Padlock Probe
  misc_feature 92, 93, 94, 95, 96, 97: n = A,T,C or G
gactggaagagcactgttcttatcccgaaaccaaaacaaatacgttggaggctcatcgttcctattcaggcagatgttatcgaggtccgacnnnnnnactaaaccgaaacaaaaactcgcaaaaatgatcggatacgcatgaggct

SEQ ID NO: 5855 - DNA, 146 bp, Artificial Sequence
  Bisulfite Padlock Probe
  misc_feature 92, 93, 94, 95, 96, 97: n = A,T,C or G
gactggaagagcactgttcttatcccgaaaccgaaacaaatacgttggaggctcatcgttcctattcaggcagatgttatcgaggtccgacnnnnnnactaaaccgaaacaaaaactcgcgaaaatgatcggatacgcatgaggct

SEQ ID NO: 5856 - DNA, 146 bp, Artificial Sequence
  Bisulfite Padlock Probe
  misc_feature 94, 95, 96, 97, 98, 99: n = A,T,C or G
gactggaagagcactgttcttatctatccatcaataaccaaacaagttggaggctcatcgttcctattcaggcagatgttatcgaggtccgacnnnnnnaaaaacttaataaaataaccgcaacaagatcggatacgcatgaggct

SEQ ID NO: 5857 - DNA, 146 bp, Artificial Sequence
  Bisulfite Padlock Probe
  misc_feature 94, 95, 96, 97, 98, 99: n = A,T,C or G
gactggaagagcactgttcttatctatccatcgataaccaaacaagttggaggctcatcgttcctattcaggcagatgttatcgaggtccgacnnnnnnaaaaacttaataaaataaccgcgacaagatcggatacgcatgaggct

SEQ ID NO: 5858 - DNA, 146 bp, Artificial Sequence
  Bisulfite Padlock Probe
  misc_feature 92, 93, 94, 95, 96, 97: n = A,T,C or G
gactggaagagcactgttcttattaaataactatacttcccccgttggaggctcatcgttcctattcaggcagatgttatcgaggtccgacnnnnnnacaatccctttacataaaaacatataactgatcggatacgcatgaggct

SEQ ID NO: 5859 - DNA, 146 bp, Artificial Sequence
  Bisulfite Padlock Probe
  misc_feature 92, 93, 94, 95, 96, 97: n = A,T,C or G
gactggaagagcactgttcttattaaataactatacttcccccgttggaggctcatcgttcctattcaggcagatgttatcgaggtccgacnnnnnnacgatccctttacataaaaacatataactgatcggatacgcatgaggct

SEQ ID NO: 5860 - DNA, 146 bp, Artificial Sequence
  Bisulfite Padlock Probe
  misc_feature 95, 96, 97, 98, 99, 100: n = A,T,C or G
gactggaagagcactgttcttattacttaaccaaataaaaacccacgttggaggctcatcgttcctattcaggcagatgttatcgaggtccgacnnnnnnaacctccaactttaacaacataatcagatcggatacgcatgaggct

SEQ ID NO: 5861 - DNA, 146 bp, Artificial Sequence
  Bisulfite Padlock Probe
  misc_feature 95, 96, 97, 98, 99, 100: n = A,T,C or G
gactggaagagcactgttcttattacttaaccaaataaaaacccacgttggaggctcatcgttcctattcaggcagatgttatcgaggtccgacnnnnnnaacctccaactttaacgacataatcagatcggatacgcatgaggct

SEQ ID NO: 5862 - DNA, 146 bp, Artificial Sequence
  Bisulfite Padlock Probe
  misc_feature 93, 94, 95, 96, 97, 98: n = A,T,C or G
gactggaagagcactgttcttatttctaaatatacatttttctcgttggaggctcatcgttcctattcaggcagatgttatcgaggtccgacnnnnnnaaaaccgaaacaaaaaccaaaacataaagatcggatacgcatgaggct

SEQ ID NO: 5863 - DNA, 146 bp, Artificial Sequence
  Bisulfite Padlock Probe
  misc_feature 93, 94, 95, 96, 97, 98: n = A,T,C or G
gactggaagagcactgttcttatttctaaatatacatttttctcgttggaggctcatcgttcctattcaggcagatgttatcgaggtccgacnnnnnnaaaaccgaaacaaaaaccaaaacgtaaagatcggatacgcatgaggct

SEQ ID NO: 5864 - DNA, 146 bp, Artificial Sequence
  Bisulfite Padlock Probe
  misc_feature 92, 93, 94, 95, 96, 97: n = A,T,C or G
gactggaagagcactgttcttcaacaacacttcctaaaaacaagttggaggctcatcgttcctattcaggcagatgttatcgaggtccgacnnnnnnaaaatactatacaaaacctcgaccacatcgatcggatacgcatgaggct

SEQ ID NO: 5865 - DNA, 146 bp, Artificial Sequence
  Bisulfite Padlock Probe
  misc_feature 92, 93, 94, 95, 96, 97: n = A,T,C or G
gactggaagagcactgttcttcaacaacacttcctaaaaacaagttggaggctcatcgttcctattcaggcagatgttatcgaggtccgacnnnnnnaaaatactatacaaaacctcgaccacgtcgatcggatacgcatgaggct

SEQ ID NO: 5866 - DNA, 146 bp, Artificial Sequence
  Bisulfite Padlock Probe
  misc_feature 92, 93, 94, 95, 96, 97: n = A,T,C or G
gactggaagagcactgttcttcataaatacaaactaactaatcgttggaggctcatcgttcctattcaggcagatgttatcgaggtccgacnnnnnnctccttccccaccaactttcttattttaagatcggatacgcatgaggct

SEQ ID NO: 5867 - DNA, 146 bp, Artificial Sequence
  Bisulfite Padlock Probe
  misc_feature 92, 93, 94, 95, 96, 97: n = A,T,C or G
gactggaagagcactgttcttcataaatacaaactaactaatcgttggaggctcatcgttcctattcaggcagatgttatcgaggtccgacnnnnnnctccttccccaccgactttcttattttaagatcggatacgcatgaggct

SEQ ID NO: 5868 - DNA, 146 bp, Artificial Sequence
  Bisulfite Padlock Probe
  misc_feature 94, 95, 96, 97, 98, 99: n = A,T,C or G
gactggaagagcactgttcttcattaaaaatacaacccccaccccgttggaggctcatcgttcctattcaggcagatgttatcgaggtccgacnnnnnntacaacttccaataaaaacaaccccacgatcggatacgcatgaggct

SEQ ID NO: 5869 - DNA, 146 bp, Artificial Sequence; identical to SEQ ID NO: 5868
  Bisulfite Padlock Probe
  misc_feature 94, 95, 96, 97, 98, 99: n = A,T,C or G

SEQ ID NO: 5870 - DNA, 146 bp, Artificial Sequence
  Bisulfite Padlock Probe
  misc_feature 94, 95, 96, 97, 98, 99: n = A,T,C or G
gactggaagagcactgttcttcattaaaaatacaacccccaccccgttggaggctcatcgttcctattcaggcagatgttatcgaggtccgacnnnnnntacaacttccgataaaaacaaccccacgatcggatacgcatgaggct

SEQ ID NO: 5871 - DNA, 146 bp, Artificial Sequence; identical to SEQ ID NO: 5870
  Bisulfite Padlock Probe
  misc_feature 94, 95, 96, 97, 98, 99: n = A,T,C or G

SEQ ID NO: 5872 - DNA, 146 bp, Artificial Sequence
  Bisulfite Padlock Probe
  misc_feature 94, 95, 96, 97, 98, 99: n = A,T,C or G
gactggaagagcactgttcttccaaaacaaaatatccaaaccaacgttggaggctcatcgttcctattcaggcagatgttatcgaggtccgacnnnnnnaccccaatctcaactaccaaccctaccgatcggatacgcatgaggct

SEQ ID NO: 5873 - DNA, 146 bp, Artificial Sequence
  Bisulfite Padlock Probe
  misc_feature 94, 95, 96, 97, 98, 99: n = A,T,C or G
gactggaagagcactgttcttccaaaacgaaatatccaaaccaacgttggaggctcatcgttcctattcaggcagatgttatcgaggtccgacnnnnnnaccccaatctcgactaccaaccctaccgatcggatacgcatgaggct

SEQ ID NO: 5874 - DNA, 146 bp, Artificial Sequence
  Bisulfite Padlock Probe
  misc_feature 93, 94, 95, 96, 97, 98: n = A,T,C or G
gactggaagagcactgttcttccactcttaactttactcaatacgttggaggctcatcgttcctattcaggcagatgttatcgaggtccgacnnnnnnaaccgaacatcctacaacaaccactaccgatcggatacgcatgaggct

SEQ ID NO: 5875 - DNA, 146 bp, Artificial Sequence
  Bisulfite Padlock Probe
  misc_feature 93, 94, 95, 96, 97, 98: n = A,T,C or G
gactggaagagcactgttcttccactcttaactttactcgatacgttggaggctcatcgttcctattcaggcagatgttatcgaggtccgacnnnnnnaaccgaacatcctacaacaaccgctaccgatcggatacgcatgaggct

SEQ ID NO: 5876 - DNA, 146 bp, Artificial Sequence
  Bisulfite Padlock Probe
  misc_feature 93, 94, 95, 96, 97, 98: n = A,T,C or G
gactggaagagcactgttcttcccccaaaatccaaaaccaaaaagttggaggctcatcgttcctattcaggcagatgttatcgaggtccgacnnnnnncacaccccctcttcctcccctactaatcgatcggatacgcatgaggct

SEQ ID NO: 5877 - DNA, 146 bp, Artificial Sequence
  Bisulfite Padlock Probe
  misc_feature 96, 97, 98, 99, 100, 101: n = A,T,C or G
gactggaagagcactgttcttcccgacccctctcaacattcaaaaacgttggaggctcatcgttcctattcaggcagatgttatcgaggtccgacnnnnnntaaaccaaaaccatcctaactcctcgatcggatacgcatgaggct

SEQ ID NO: 5878 - DNA, 146 bp, Artificial Sequence
  Bisulfite Padlock Probe
  misc_feature 96, 97, 98, 99, 100, 101: n = A,T,C or G
gactggaagagcactgttcttcccgacccctctcgacattcaaaaacgttggaggctcatcgttcctattcaggcagatgttatcgaggtccgacnnnnnntaaaccaaaaccatcctaactcctcgatcggatacgcatgaggct

SEQ ID NO: 5879 - DNA, 146 bp, Artificial Sequence
  Bisulfite Padlock Probe
  misc_feature 95, 96, 97, 98, 99, 100: n = A,T,C or G
gactggaagagcactgttcttccctaaccaaaatttacaaaaacccgttggaggctcatcgttcctattcaggcagatgttatcgaggtccgacnnnnnncaaccccacccgccattatcctaatcgatcggatacgcatgaggct

SEQ ID NO: 5880 - DNA, 146 bp, Artificial Sequence
  Bisulfite Padlock Probe
  misc_feature 95, 96, 97, 98, 99, 100: n = A,T,C or G
gactggaagagcactgttcttccctaaccaaaatttacaaaaacccgttggaggctcatcgttcctattcaggcagatgttatcgaggtccgacnnnnnncaaccccacccgccgttatcctaatcgatcggatacgcatgaggct

SEQ ID NO: 5881 - DNA, 146 bp, Artificial Sequence
  Bisulfite Padlock Probe
  misc_feature 92, 93, 94, 95, 96, 97: n = A,T,C or G
gactggaagagcactgttcttcccttttacacccccaacaaccgttggaggctcatcgttcctattcaggcagatgttatcgaggtccgacnnnnnnccctctccactcataattaaccctaaattgatcggatacgcatgaggct

SEQ ID NO: 5882 - DNA, 146 bp, Artificial Sequence
  Bisulfite Padlock Probe
  misc_feature 92, 93, 94, 95, 96, 97: n = A,T,C or G
gactggaagagcactgttcttcccttttacacccccgacaaccgttggaggctcatcgttcctattcaggcagatgttatcgaggtccgacnnnnnnccctctccactcataattaaccctaaattgatcggatacgcatgaggct

SEQ ID NO: 5883 - DNA, 146 bp, Artificial Sequence
  Bisulfite Padlock Probe
  misc_feature 95, 96, 97, 98, 99, 100: n = A,T,C or G
gactggaagagcactgttcttccgcactccaaactttacacctcacgttggaggctcatcgttcctattcaggcagatgttatcgaggtccgacnnnnnnaaaaatcgtcccccaaacaccaaaccgatcggatacgcatgaggct

SEQ ID NO: 5884 - DNA, 146 bp, Artificial Sequence
  Bisulfite Padlock Probe
  misc_feature 95, 96, 97, 98, 99, 100: n = A,T,C or G
gactggaagagcactgttcttccgcactccgaactttacacctcacgttggaggctcatcgttcctattcaggcagatgttatcgaggtccgacnnnnnnaaaaatcgtcccccaaacgccaaaccgatcggatacgcatgaggct

SEQ ID NO: 5885 - DNA, 146 bp, Artificial Sequence
  Bisulfite Padlock Probe
  misc_feature 96, 97, 98, 99, 100, 101: n = A,T,C or G
gactggaagagcactgttcttccgcctcgaaaaatcaacaacataaagttggaggctcatcgttcctattcaggcagatgttatcgaggtccgacnnnnnnccgactccgataattaaacaaaaaagatcggatacgcatgaggct

SEQ ID NO: 5886 - DNA, 146 bp, Artificial Sequence
  Bisulfite Padlock Probe
  misc_feature 96, 97, 98, 99, 100, 101: n = A,T,C or G
gactggaagagcactgttcttccgcctcgaaaaatcgacaacataaagttggaggctcatcgttcctattcaggcagatgttatcgaggtccgacnnnnnnccgactccgataattaaacgaaaaagatcggatacgcatgaggct

SEQ ID NO: 5887 - DNA, 146 bp, Artificial Sequence
  Bisulfite Padlock Probe
  misc_feature 93, 94, 95, 96, 97, 98: n = A,T,C or G
gactggaagagcactgttcttcctaaccctcacaaataactcccgttggaggctcatcgttcctattcaggcagatgttatcgaggtccgacnnnnnncaccctacgcctcacctacaataacaacgatcggatacgcatgaggct

SEQ ID NO: 5888 - DNA, 146 bp, Artificial Sequence
  Bisulfite Padlock Probe
  misc_feature 93, 94, 95, 96, 97, 98: n = A,T,C or G
gactggaagagcactgttcttcctaaccctcgcaaataactcccgttggaggctcatcgttcctattcaggcagatgttatcgaggtccgacnnnnnncaccctacgcctcgcctacaataacaacgatcggatacgcatgaggct

SEQ ID NO: 5889 - DNA, 146 bp, Artificial Sequence
  Bisulfite Padlock Probe
  misc_feature 92, 93, 94, 95, 96, 97: n = A,T,C or G
gactggaagagcactgttcttcctccctccaaccttctccctcgttggaggctcatcgttcctattcaggcagatgttatcgaggtccgacnnnnnnacgataacctacccaaacacatccaactagatcggatacgcatgaggct

SEQ ID NO: 5890 - DNA, 146 bp, Artificial Sequence
  Bisulfite Padlock Probe
  misc_feature 92, 93, 94, 95, 96, 97: n = A,T,C or G
gactggaagagcactgttcttcctccctccaaccttctccctcgttggaggctcatcgttcctattcaggcagatgttatcgaggtccgacnnnnnnacgataacctacccaaacacgtccaactagatcggatacgcatgaggct

SEQ ID NO: 5891 - DNA, 146 bp, Artificial Sequence
  Bisulfite Padlock Probe
  misc_feature 96, 97, 98, 99, 100, 101: n = A,T,C or G
gactggaagagcactgttcttcgaacctctcctctccatctccaaaagttggaggctcatcgttcctattcaggcagatgttatcgaggtccgacnnnnnnaaccaattaactccccacctttaacgatcggatacgcatgaggct

SEQ ID NO: 5892 - DNA, 146 bp, Artificial Sequence
  Bisulfite Padlock Probe
  misc_feature 96, 97, 98, 99, 100, 101: n = A,T,C or G
gactggaagagcactgttcttcgaacctctcctctccgtctccaaaagttggaggctcatcgttcctattcaggcagatgttatcgaggtccgacnnnnnnaaccaattaactccccgcctttaacgatcggatacgcatgaggct

SEQ ID NO: 5893 - DNA, 146 bp, Artificial Sequence
  Bisulfite Padlock Probe
  misc_feature 93, 94, 95, 96, 97, 98: n = A,T,C or G
gactggaagagcactgttcttctaaacgccgccctcaataccacgttggaggctcatcgttcctattcaggcagatgttatcgaggtccgacnnnnnnccctataccgcctcgcaaatcctaaaaagatcggatacgcatgaggct

SEQ ID NO: 5894 - DNA, 146 bp, Artificial Sequence
  Bisulfite Padlock Probe
  misc_feature 93, 94, 95, 96, 97, 98: n = A,T,C or G
gactggaagagcactgttcttctaaacgccgccctcgataccacgttggaggctcatcgttcctattcaggcagatgttatcgaggtccgacnnnnnnccctataccgcctcgcgaatcctaaaaagatcggatacgcatgaggct

SEQ ID NO: 5895 - DNA, 146 bp, Artificial Sequence
  Bisulfite Padlock Probe
  misc_feature 94, 95, 96, 97, 98, 99: n = A,T,C or G
gactggaagagcactgttcttctacaaccgaaacccgaccaaaacgttggaggctcatcgttcctattcaggcagatgttatcgaggtccgacnnnnnngaattccgtcccaaccctactcacaacgatcggatacgcatgaggct

SEQ ID NO: 5896 - DNA, 146 bp, Artificial Sequence
  Bisulfite Padlock Probe
  misc_feature 94, 95, 96, 97, 98, 99: n = A,T,C or G
gactggaagagcactgttcttctacaaccgaaacccgaccgaaacgttggaggctcatcgttcctattcaggcagatgttatcgaggtccgacnnnnnngaattccgtcccgaccctactcacaacgatcggatacgcatgaggct

SEQ ID NO: 5897 - DNA, 146 bp, Artificial Sequence
  Bisulfite Padlock Probe
  misc_feature 92, 93, 94, 95, 96, 97: n = A,T,C or G
gactggaagagcactgttcttctacatccccttccaaaccaccgttggaggctcatcgttcctattcaggcagatgttatcgaggtccgacnnnnnntcacgctaataatattcaacctaatcttcgatcggatacgcatgaggct

SEQ ID NO: 5898 - DNA, 146 bp, Artificial Sequence
  Bisulfite Padlock Probe
  misc_feature 92, 93, 94, 95, 96, 97: n = A,T,C or G
gactggaagagcactgttcttctacatccccttccaaaccaccgttggaggctcatcgttcctattcaggcagatgttatcgaggtccgacnnnnnntcacgctaataatattcgacctaatcttcgatcggatacgcatgaggct

SEQ ID NO: 5899 - DNA, 146 bp, Artificial Sequence
  Bisulfite Padlock Probe
  misc_feature 95, 96, 97, 98, 99, 100: n = A,T,C or G
gactggaagagcactgttcttctcacctctacgaacaaaacctaacgttggaggctcatcgttcctattcaggcagatgttatcgaggtccgacnnnnnnatttcccaaaccaaacaacccaaaaagatcggatacgcatgaggct

SEQ ID NO: 5900 - DNA, 146 bp, Artificial Sequence
  Bisulfite Padlock Probe
  misc_feature 95, 96, 97, 98, 99, 100: n = A,T,C or G
gactggaagagcactgttcttctcacctctacgaacgaaacctaacgttggaggctcatcgttcctattcaggcagatgttatcgaggtccgacnnnnnnatttcccaaaccaaacaacccaaaaagatcggatacgcatgaggct

SEQ ID NO: 5901 - DNA, 146 bp, Artificial Sequence
  Bisulfite Padlock Probe
  misc_feature 94, 95, 96, 97, 98, 99: n = A,T,C or G
gactggaagagcactgttcttctcccaaaccttcctccttccttcgttggaggctcatcgttcctattcaggcagatgttatcgaggtccgacnnnnnnccatcaatcaccacaaccaaacccaacgatcggatacgcatgaggct

SEQ ID NO: 5902 - DNA, 146 bp, Artificial Sequence
  Bisulfite Padlock Probe
  misc_feature 94, 95, 96, 97, 98, 99: n = A,T,C or G
gactggaagagcactgttcttctcccgaaccttcctccttccttcgttggaggctcatcgttcctattcaggcagatgttatcgaggtccgacnnnnnnccatcaatcaccgcaaccaaacccaacgatcggatacgcatgaggct

SEQ ID NO: 5903 - DNA, 146 bp, Artificial Sequence
  Bisulfite Padlock Probe
  misc_feature 94, 95, 96, 97, 98, 99: n = A,T,C or G
gactggaagagcactgttcttctcctaacctcgaaaaacaaaaccgttggaggctcatcgttcctattcaggcagatgttatcgaggtccgacnnnnnnaaaaataaaataacccgaccaaaaaacgatcggatacgcatgaggct

SEQ ID NO: 5904 - DNA, 146 bp, Artificial Sequence
  Bisulfite Padlock Probe
  misc_feature 94, 95, 96, 97, 98, 99: n = A,T,C or G
gactggaagagcactgttcttctcctaacctcgaaaaacgaaaccgttggaggctcatcgttcctattcaggcagatgttatcgaggtccgacnnnnnnaaaaataaaataacccgaccgaaaaacgatcggatacgcatgaggct

SEQ ID NO: 5905 - DNA, 146 bp, Artificial Sequence
  Bisulfite Padlock Probe
  misc_feature 96, 97, 98, 99, 100, 101: n = A,T,C or G
gactggaagagcactgttcttctctaacctcgaatccaaaatataacgttggaggctcatcgttcctattcaggcagatgttatcgaggtccgacnnnnnnctcgaaaacctcaactcataccctcgatcggatacgcatgaggct

SEQ ID NO: 5906 - DNA, 146 bp, Artificial Sequence
  Bisulfite Padlock Probe
  misc_feature 96, 97, 98, 99, 100, 101: n = A,T,C or G
gactggaagagcactgttcttctctaacctcgaatccgaaatataacgttggaggctcatcgttcctattcaggcagatgttatcgaggtccgacnnnnnnctcgaaaacctcaactcgtaccctcgatcggatacgcatgaggct

SEQ ID NO: 5907 - DNA, 146 bp, Artificial Sequence
  Bisulfite Padlock Probe
  misc_feature 92, 93, 94, 95, 96, 97: n = A,T,C or G
gactggaagagcactgttcttcttcaactcgtacttcaacatcgttggaggctcatcgttcctattcaggcagatgttatcgaggtccgacnnnnnnaaaaataattataaaacaccaacaactccgatcggatacgcatgaggct

SEQ ID NO: 5908 - DNA, 146 bp, Artificial Sequence
  Bisulfite Padlock Probe
  misc_feature 92, 93, 94, 95, 96, 97: n = A,T,C or G
gactggaagagcactgttcttcttcaactcgtacttcgacatcgttggaggctcatcgttcctattcaggcagatgttatcgaggtccgacnnnnnnaaaaataattataaaacaccgacaactccgatcggatacgcatgaggct

SEQ ID NO: 5909 - DNA, 146 bp, Artificial Sequence
  Bisulfite Padlock Probe
  misc_feature 92, 93, 94, 95, 96, 97: n = A,T,C or G
gactggaagagcactgttctttaaaatcgaccaaaatctacccgttggaggctcatcgttcctattcaggcagatgttatcgaggtccgacnnnnnnataaactaaaaatatatctccctccccaagatcggatacgcatgaggct

SEQ ID NO: 5910 - DNA, 146 bp, Artificial Sequence
  Bisulfite Padlock Probe
  misc_feature 92, 93, 94, 95, 96, 97: n = A,T,C or G
gactggaagagcactgttctttaaaatcgaccgaaatctacccgttggaggctcatcgttcctattcaggcagatgttatcgaggtccgacnnnnnnataaactaaaaatatatctccctccccaagatcggatacgcatgaggct

SEQ ID NO: 5911 - DNA, 146 bp, Artificial Sequence
  Bisulfite Padlock Probe
  misc_feature 92, 93, 94, 95, 96, 97: n = A,T,C or G
gactggaagagcactgttctttaacgaccgccgaaccaaaaaagttggaggctcatcgttcctattcaggcagatgttatcgaggtccgacnnnnnntcaaaaacaattcacctaatcactacaaagatcggatacgcatgaggct

SEQ ID NO: 5912 - DNA, 146 bp, Artificial Sequence
  Bisulfite Padlock Probe
  misc_feature 92, 93, 94, 95, 96, 97: n = A,T,C or G
gactggaagagcactgttctttaacgaccgccgaaccgaaaaagttggaggctcatcgttcctattcaggcagatgttatcgaggtccgacnnnnnntcaaaaacaattcacctaatcgctacaaagatcggatacgcatgaggct

SEQ ID NO: 5913 - DNA, 146 bp, Artificial Sequence
  Bisulfite Padlock Probe
  misc_feature 95, 96, 97, 98, 99, 100: n = A,T,C or G
gactggaagagcactgttctttaataacaattattaataccatcatgttggaggctcatcgttcctattcaggcagatgttatcgaggtccgacnnnnnnaacaaaaccgactaacaaccgcaaacgatcggatacgcatgaggct

SEQ ID NO: 5914 - DNA, 146 bp, Artificial Sequence
  Bisulfite Padlock Probe
  misc_feature 95, 96, 97, 98, 99, 100: n = A,T,C or G
gactggaagagcactgttctttaataacgattattaataccatcatgttggaggctcatcgttcctattcaggcagatgttatcgaggtccgacnnnnnnaacaaaaccgactaacaaccgcgaacgatcggatacgcatgaggct

SEQ ID NO: 5915 - DNA, 146 bp, Artificial Sequence
  Bisulfite Padlock Probe
  misc_feature 93, 94, 95, 96, 97, 98: n = A,T,C or G
gactggaagagcactgttctttaatctaaactattttatcctccgttggaggctcatcgttcctattcaggcagatgttatcgaggtccgacnnnnnnaccctacttaactctccccacactttaagatcggatacgcatgaggct

SEQ ID NO: 5916 - DNA, 146 bp, Artificial Sequence
  Bisulfite Padlock Probe
  misc_feature 93, 94, 95, 96, 97, 98: n = A,T,C or G
gactggaagagcactgttctttaatctaaactattttatcctccgttggaggctcatcgttcctattcaggcagatgttatcgaggtccgacnnnnnnaccctacttaactctccccgcactttaagatcggatacgcatgaggct

SEQ ID NO: 5917 - DNA, 146 bp, Artificial Sequence
  Bisulfite Padlock Probe
  misc_feature 93, 94, 95, 96, 97, 98: n = A,T,C or G
gactggaagagcactgttctttatctacccatccaaataaatctgttggaggctcatcgttcctattcaggcagatgttatcgaggtccgacnnnnnncctctaacttaatactaaaaccatccacgatcggatacgcatgaggct

SEQ ID NO: 5918 - DNA, 146 bp, Artificial Sequence
  Bisulfite Padlock Probe
  misc_feature 92, 93, 94, 95, 96, 97: n = A,T,C or G
gactggaagagcactgttctttattaaacaacccaaaaacttcgttggaggctcatcgttcctattcaggcagatgttatcgaggtccgacnnnnnnactaaatcaactaccactaacctaaactcgatcggatacgcatgaggct

SEQ ID NO: 5919 - DNA, 146 bp, Artificial Sequence
  Bisulfite Padlock Probe
  misc_feature 92, 93, 94, 95, 96, 97: n = A,T,C or G
gactggaagagcactgttctttattaaacaacccaaaaacttcgttggaggctcatcgttcctattcaggcagatgttatcgaggtccgacnnnnnnactaaatcgactaccactaacctaaactcgatcggatacgcatgaggct

SEQ ID NO: 5920 - DNA, 146 bp, Artificial Sequence
  Bisulfite Padlock Probe
  misc_feature 93, 94, 95, 96, 97, 98: n = A,T,C or G
gactggaagagcactgttctttattcgtaaccaaccttttaaaagttggaggctcatcgttcctattcaggcagatgttatcgaggtccgacnnnnnnacaacgctatcctccataattctatcccgatcggatacgcatgaggct

SEQ ID NO: 5921 - DNA, 146 bp, Artificial Sequence
  Bisulfite Padlock Probe
  misc_feature 93, 94, 95, 96, 97, 98: n = A,T,C or G
gactggaagagcactgttctttattcgtaaccgaccttttaaaagttggaggctcatcgttcctattcaggcagatgttatcgaggtccgacnnnnnnacaacgctatcctccgtaattctatcccgatcggatacgcatgaggct

SEQ ID NO: 5922 - DNA, 146 bp, Artificial Sequence
  Bisulfite Padlock Probe
  misc_feature 93, 94, 95, 96, 97, 98: n = A,T,C or G
gactggaagagcactgttctttcaaacctctctccaacactaccgttggaggctcatcgttcctattcaggcagatgttatcgaggtccgacnnnnnnaaacgaaaaatacaaacttcaaaaacttgatcggatacgcatgaggct

SEQ ID NO: 5923 - DNA, 146 bp, Artificial Sequence
  Bisulfite Padlock Probe
  misc_feature 93, 94, 95, 96, 97, 98: n = A,T,C or G
gactggaagagcactgttctttcaaacctctctccgacactaccgttggaggctcatcgttcctattcaggcagatgttatcgaggtccgacnnnnnnaaacgaaaaatacgaacttcaaaaacttgatcggatacgcatgaggct

SEQ ID NO: 5924 - DNA, 146 bp, Artificial Sequence
  Bisulfite Padlock Probe
  misc_feature 92, 93, 94, 95, 96, 97: n = A,T,C or G
gactggaagagcactgttctttccccctcttcccttcctcaaagttggaggctcatcgttcctattcaggcagatgttatcgaggtccgacnnnnnnaaatcctactcaccttaaacttaataaccgatcggatacgcatgaggct

SEQ ID NO: 5925 - DNA, 146 bp, Artificial Sequence
  Bisulfite Padlock Probe
  misc_feature 96, 97, 98, 99, 100, 101: n = A,T,C or G
gactggaagagcactgttctttccctcctaaatccccaactacaaccgttggaggctcatcgttcctattcaggcagatgttatcgaggtccgacnnnnnncacaaccgcccaaaaactccctttcgatcggatacgcatgaggct

SEQ ID NO: 5926 - DNA, 146 bp, Artificial Sequence
  Bisulfite Padlock Probe
  misc_feature 96, 97, 98, 99, 100, 101: n = A,T,C or G
gactggaagagcactgttctttccctcctaaatccccaactacaaccgttggaggctcatcgttcctattcaggcagatgttatcgaggtccgacnnnnnncacaaccgcccgaaaactccctttcgatcggatacgcatgaggct

SEQ ID NO: 5927 - DNA, 146 bp, Artificial Sequence
  Bisulfite Padlock Probe
  misc_feature 92, 93, 94, 95, 96, 97: n = A,T,C or G
gactggaagagcactgttctttccgacaactaaaaaccacaacgttggaggctcatcgttcctattcaggcagatgttatcgaggtccgacnnnnnnaaataactctaccccaaccaaataaaaccgatcggatacgcatgaggct

SEQ ID NO: 5928 - DNA, 146 bp, Artificial Sequence
  Bisulfite Padlock Probe
  misc_feature 92, 93, 94, 95, 96, 97: n = A,T,C or G
gactggaagagcactgttctttccgacaactaaaaaccgcaacgttggaggctcatcgttcctattcaggcagatgttatcgaggtccgacnnnnnnaaataactctaccccgaccaaataaaaccgatcggatacgcatgaggct

SEQ ID NO: 5929 - DNA, 146 bp, Artificial Sequence
  Bisulfite Padlock Probe
  misc_feature 92, 93, 94, 95, 96, 97: n = A,T,C or G
gactggaagagcactgttcttttaattaaaactaaaacaccccgttggaggctcatcgttcctattcaggcagatgttatcgaggtccgacnnnnnntaccccaatatctacgcgcaatataaatcgatcggatacgcatgaggct

SEQ ID NO: 5930 - DNA, 146 bp, Artificial Sequence
  Bisulfite Padlock Probe
  misc_feature 92, 93, 94, 95, 96, 97: n = A,T,C or G
gactggaagagcactgttcttttaattaaaactaaaacgccccgttggaggctcatcgttcctattcaggcagatgttatcgaggtccgacnnnnnntaccccaatatctacgcgcgatataaatcgatcggatacgcatgaggct

SEQ ID NO: 5931 - DNA, 146 bp, Artificial Sequence
  Bisulfite Padlock Probe
  misc_feature 92, 93, 94, 95, 96, 97: n = A,T,C or G
gactggaagagcactgttcttttacaaaaaccccaaaacaaacgttggaggctcatcgttcctattcaggcagatgttatcgaggtccgacnnnnnnaaaacaaaacaacctaaccttctaacatcgatcggatacgcatgaggct

SEQ ID NO: 5932 - DNA, 146 bp, Artificial Sequence
  Bisulfite Padlock Probe
  misc_feature 92, 93, 94, 95, 96, 97: n = A,T,C or G
gactggaagagcactgttcttttacaaaaaccccaaaacaaacgttggaggctcatcgttcctattcaggcagatgttatcgaggtccgacnnnnnnaaaacaaaacgacctaaccttctaacatcgatcggatacgcatgaggct

SEQ ID NO: 5933 - DNA, 146 bp, Artificial Sequence
  Bisulfite Padlock Probe
  misc_feature 92, 93, 94, 95, 96, 97: n = A,T,C or G
gactggaagagcactgttctttttaaacctcaaaaccatccacgttggaggctcatcgttcctattcaggcagatgttatcgaggtccgacnnnnnnaaaccaataacactactacccccaaacttgatcggatacgcatgaggct

SEQ ID NO: 5934 - DNA, 146 bp, Artificial Sequence
  Bisulfite Padlock Probe
  misc_feature 92, 93, 94, 95, 96, 97: n = A,T,C or G
gactggaagagcactgttctttttaaacctcgaaaccatccacgttggaggctcatcgttcctattcaggcagatgttatcgaggtccgacnnnnnnaaaccaataacactactacccccaaacttgatcggatacgcatgaggct

SEQ ID NO: 5935 - DNA, 146 bp, Artificial Sequence
  Bisulfite Padlock Probe
  misc_feature 93, 94, 95, 96, 97, 98: n = A,T,C or G
gactggaagagcactgttgaaaaacgccgacgaacccaaattccgttggaggctcatcgttcctattcaggcagatgttatcgaggtccgacnnnnnncttccccgacgcgaaacaactttaaaaagatcggatacgcatgaggct

SEQ ID NO: 5936 - DNA, 146 bp, Artificial Sequence
  Bisulfite Padlock Probe
  misc_feature 93, 94, 95, 96, 97, 98: n = A,T,C or G
gactggaagagcactgttgaaaaacgccgacgaacccgaattccgttggaggctcatcgttcctattcaggcagatgttatcgaggtccgacnnnnnncttccccgacgcgaaacgactttaaaaagatcggatacgcatgaggct

SEQ ID NO: 5937 - DNA, 146 bp, Artificial Sequence
  Bisulfite Padlock Probe
  misc_feature 95, 96, 97, 98, 99, 100: n = A,T,C or G
gactggaagagcactgttgaaaaatacgaaaatctaaaccaaaaaagttggaggctcatcgttcctattcaggcagatgttatcgaggtccgacnnnnnnctttctcttcctactacgaacaacccgatcggatacgcatgaggct

SEQ ID NO: 5938 - DNA, 146 bp, Artificial Sequence
  Bisulfite Padlock Probe
  misc_feature 95, 96, 97, 98, 99, 100: n = A,T,C or G
gactggaagagcactgttgaaaaatacgaaaatctaaaccgaaaaagttggaggctcatcgttcctattcaggcagatgttatcgaggtccgacnnnnnnctttctcttcctactacgaacgacccgatcggatacgcatgaggct

SEQ ID NO: 5939 - DNA, 146 bp, Artificial Sequence
  Bisulfite Padlock Probe
  misc_feature 92, 93, 94, 95, 96, 97: n = A,T,C or G
gactggaagagcactgttgaaaacgaaaccgaaaaaccataaagttggaggctcatcgttcctattcaggcagatgttatcgaggtccgacnnnnnnaaaacccgaataccaacaaaactaaactagatcggatacgcatgaggct

SEQ ID NO: 5940 - DNA, 146 bp, Artificial Sequence
  Bisulfite Padlock Probe
  misc_feature 92, 93, 94, 95, 96, 97: n = A,T,C or G
gactggaagagcactgttgaaaacgaaaccgaaaaaccgtaaagttggaggctcatcgttcctattcaggcagatgttatcgaggtccgacnnnnnnaaaacccgaataccaacgaaactaaactagatcggatacgcatgaggct

SEQ ID NO: 5941 - DNA, 146 bp, Artificial Sequence
  Bisulfite Padlock Probe
  misc_feature 95, 96, 97, 98, 99, 100: n = A,T,C or G
gactggaagagcactgttgaaaacgcccgacaaaataacccaaaaagttggaggctcatcgttcctattcaggcagatgttatcgaggtccgacnnnnnncacccactactcgtcgctccaaaaaagatcggatacgcatgaggct

SEQ ID NO: 5942 - DNA, 146 bp, Artificial Sequence
  Bisulfite Padlock Probe
  misc_feature 95, 96, 97, 98, 99, 100: n = A,T,C or G
gactggaagagcactgttgaaaacgcccgacgaaataacccaaaaagttggaggctcatcgttcctattcaggcagatgttatcgaggtccgacnnnnnncacccactactcgtcgctccgaaaaagatcggatacgcatgaggct

SEQ ID NO: 5943 - DNA, 146 bp, Artificial Sequence
  Bisulfite Padlock Probe
  misc_feature 96, 97, 98, 99, 100, 101: n = A,T,C or G
gactggaagagcactgttgaaaatcgctccaacgatacactcaacccgttggaggctcatcgttcctattcaggcagatgttatcgaggtccgacnnnnnntcctctctcctccccacaacactacgatcggatacgcatgaggct

SEQ ID NO: 5944 - DNA, 146 bp, Artificial Sequence
  Bisulfite Padlock Probe
  misc_feature 96, 97, 98, 99, 100, 101: n = A,T,C or G
gactggaagagcactgttgaaaatcgctccaacgatacactcgacccgttggaggctcatcgttcctattcaggcagatgttatcgaggtccgacnnnnnntcctctctcctccccgcaacactacgatcggatacgcatgaggct

SEQ ID NO: 5945 - DNA, 146 bp, Artificial Sequence
  Bisulfite Padlock Probe
  misc_feature 96, 97, 98, 99, 100, 101: n = A,T,C or G
gactggaagagcactgttgaaaccacaactctaaataaataacccaagttggaggctcatcgttcctattcaggcagatgttatcgaggtccgacnnnnnncaaaaacaaccgaaaacgcgacgcagatcggatacgcatgaggct

SEQ ID NO: 5946 - DNA, 146 bp, Artificial Sequence
  Bisulfite Padlock Probe
  misc_feature 94, 95, 96, 97, 98, 99: n = A,T,C or G
gactggaagagcactgttgaaacccgactccaacaacgattcaacgttggaggctcatcgttcctattcaggcagatgttatcgaggtccgacnnnnnnacccaaacccaaaaaccctcctaaaaagatcggatacgcatgaggct

SEQ ID NO: 5947 - DNA, 146 bp, Artificial Sequence
  Bisulfite Padlock Probe
  misc_feature 94, 95, 96, 97, 98, 99: n = A,T,C or G
gactggaagagcactgttgaaacccgactccaacaacgattcgacgttggaggctcatcgttcctattcaggcagatgttatcgaggtccgacnnnnnnacccaaacccgaaaaccctcctaaaaagatcggatacgcatgaggct

SEQ ID NO: 5948 - DNA, 146 bp, Artificial Sequence
  Bisulfite Padlock Probe
  misc_feature 94, 95, 96, 97, 98, 99: n = A,T,C or G
gactggaagagcactgttgaaaccgaaaacccgcaatcaccaaaagttggaggctcatcgttcctattcaggcagatgttatcgaggtccgacnnnnnngcttttacgcgaaaacgtccacaaaacgatcggatacgcatgaggct

SEQ ID NO: 5949 - DNA, 146 bp, Artificial Sequence
  Bisulfite Padlock Probe
  misc_feature 94, 95, 96, 97, 98, 99: n = A,T,C or G
gactggaagagcactgttgaaaccgaaaacccgcgatcaccaaaagttggaggctcatcgttcctattcaggcagatgttatcgaggtccgacnnnnnngcttttacgcgaaaacgtccgcaaaacgatcggatacgcatgaggct

SEQ ID NO: 5950 - DNA, 146 bp, Artificial Sequence
  Bisulfite Padlock Probe
  misc_feature 96, 97, 98, 99, 100, 101: n = A,T,C or G
gactggaagagcactgttgaaaccgcaactctaaataaataacccaagttggaggctcatcgttcctattcaggcagatgttatcgaggtccgacnnnnnncaaaaacaaccgaaaacgcgacgcggatcggatacgcatgaggct

SEQ ID NO: 5951 - DNA, 146 bp, Artificial Sequence
  Bisulfite Padlock Probe
  misc_feature 94, 95, 96, 97, 98, 99: n = A,T,C or G
gactggaagagcactgttgaaacgccgctactccaacctaaaaacgttggaggctcatcgttcctattcaggcagatgttatcgaggtccgacnnnnnngataccgacctctacactcccaacaacgatcggatacgcatgaggct

SEQ ID NO: 5952 - DNA, 146 bp, Artificial Sequence
  Bisulfite Padlock Probe
  misc_feature 94, 95, 96, 97, 98, 99: n = A,T,C or G
gactggaagagcactgttgaaacgccgctactccgacctaaaaacgttggaggctcatcgttcctattcaggcagatgttatcgaggtccgacnnnnnngataccgacctctacgctcccaacaacgatcggatacgcatgaggct

SEQ ID NO: 5953 - DNA, 146 bp, Artificial Sequence
  Bisulfite Padlock Probe
  misc_feature 92, 93, 94, 95, 96, 97: n = A,T,C or G
gactggaagagcactgttgaaacgtacgcgccgaccataaaaagttggaggctcatcgttcctattcaggcagatgttatcgaggtccgacnnnnnncccacacaactaatactcaaactcaaaaagatcggatacgcatgaggct

SEQ ID NO: 5954 - DNA, 146 bp, Artificial Sequence
  Bisulfite Padlock Probe
  misc_feature 92, 93, 94, 95, 96, 97: n = A,T,C or G
gactggaagagcactgttgaaacgtacgcgccgaccgtaaaaagttggaggctcatcgttcctattcaggcagatgttatcgaggtccgacnnnnnncccacgcaactaatactcaaactcaaaaagatcggatacgcatgaggct

SEQ ID NO: 5955 - DNA, 146 bp, Artificial Sequence
  Bisulfite Padlock Probe
  misc_feature 92, 93, 94, 95, 96, 97: n = A,T,C or G
gactggaagagcactgttgaaactcctaccaaccccaacccccgttggaggctcatcgttcctattcaggcagatgttatcgaggtccgacnnnnnnttccaatcacatttatcttacaaacgacggatcggatacgcatgaggct

SEQ ID NO: 5956 - DNA, 146 bp, Artificial Sequence
  Bisulfite Padlock Probe
  misc_feature 95, 96, 97, 98, 99, 100: n = A,T,C or G
gactggaagagcactgttgaacaaacacgcaacccaaaacccaaaagttggaggctcatcgttcctattcaggcagatgttatcgaggtccgacnnnnnngcccgatccgcacatttataacaaccgatcggatacgcatgaggct

SEQ ID NO: 5957 - DNA, 146 bp, Artificial Sequence
  Bisulfite Padlock Probe
  misc_feature 95, 96, 97, 98, 99, 100: n = A,T,C or G
gactggaagagcactgttgaacaaacacgcaacccgaaacccaaaagttggaggctcatcgttcctattcaggcagatgttatcgaggtccgacnnnnnngcccgatccgcgcatttataacaaccgatcggatacgcatgaggct

SEQ ID NO: 5958 - DNA, 146 bp, Artificial Sequence
  Bisulfite Padlock Probe
  misc_feature 92, 93, 94, 95, 96, 97: n = A,T,C or G
gactggaagagcactgttgaacaccctcccaaatccaaaacccgttggaggctcatcgttcctattcaggcagatgttatcgaggtccgacnnnnnnctacgtacaaaaataacataaatccaaacgatcggatacgcatgaggct

SEQ ID NO: 5959 - DNA, 146 bp, Artificial Sequence
  Bisulfite Padlock Probe
  misc_feature 92, 93, 94, 95, 96, 97: n = A,T,C or G
gactggaagagcactgttgaacaccctcccgaatccaaaacccgttggaggctcatcgttcctattcaggcagatgttatcgaggtccgacnnnnnnctacgtacgaaaataacataaatccaaacgatcggatacgcatgaggct

SEQ ID NO: 5960 - DNA, 146 bp, Artificial Sequence
  Bisulfite Padlock Probe
  misc_feature 94, 95, 96, 97, 98, 99: n = A,T,C or G
gactggaagagcactgttgaacacttcaaactctttaattattttgttggaggctcatcgttcctattcaggcagatgttatcgaggtccgacnnnnnncaaccgccgaacccgactatacatatcgatcggatacgcatgaggct

SEQ ID NO: 5961 - DNA, 146 bp, Artificial Sequence
  Bisulfite Padlock Probe
  misc_feature 92, 93, 94, 95, 96, 97: n = A,T,C or G
gactggaagagcactgttgaaccgaaaccgcaaaacctccaacgttggaggctcatcgttcctattcaggcagatgttatcgaggtccgacnnnnnnaaaaataaatcaccccgtccgtcccaatcgatcggatacgcatgaggct

SEQ ID NO: 5962 - DNA, 146 bp, Artificial Sequence
  Bisulfite Padlock Probe
  misc_feature 92, 93, 94, 95, 96, 97: n = A,T,C or G
gactggaagagcactgttgaaccgaaaccgcgaaacctccaacgttggaggctcatcgttcctattcaggcagatgttatcgaggtccgacnnnnnnaaaaataaatcaccccgtccgtcccgatcgatcggatacgcatgaggct

SEQ ID NO: 5963 - DNA, 146 bp, Artificial Sequence
  Bisulfite Padlock Probe
  misc_feature 92, 93, 94, 95, 96, 97: n = A,T,C or G
gactggaagagcactgttgaaccgaacccaataacccgcaaacgttggaggctcatcgttcctattcaggcagatgttatcgaggtccgacnnnnnnccaataaaacacaaccaattcccaaacccgatcggatacgcatgaggct

SEQ ID NO: 5964 - DNA, 146 bp, Artificial Sequence
  Bisulfite Padlock Probe
  misc_feature 92, 93, 94, 95, 96, 97: n = A,T,C or G
gactggaagagcactgttgaaccgaacccaataacccgcgaacgttggaggctcatcgttcctattcaggcagatgttatcgaggtccgacnnnnnnccaataaaacgcaaccaattcccaaacccgatcggatacgcatgaggct

SEQ ID NO: 5965 - DNA, 146 bp, Artificial Sequence
  Bisulfite Padlock Probe
  misc_feature 93, 94, 95, 96, 97, 98: n = A,T,C or G
gactggaagagcactgttgaaccgaacgcccaaactacctaaccgttggaggctcatcgttcctattcaggcagatgttatcgaggtccgacnnnnnnaaaaacgcgattcgactccaaactccaagatcggatacgcatgaggct

SEQ ID NO: 5966 - DNA, 146 bp, Artificial Sequence
  Bisulfite Padlock Probe
  misc_feature 93, 94, 95, 96, 97, 98: n = A,T,C or G
gactggaagagcactgttgaaccgaacgcccgaactacctaaccgttggaggctcatcgttcctattcaggcagatgttatcgaggtccgacnnnnnnaaaaacgcgattcgactccaaactccgagatcggatacgcatgaggct

SEQ ID NO: 5967 - DNA, 146 bp, Artificial Sequence
  Bisulfite Padlock Probe
  misc_feature 95, 96, 97, 98, 99, 100: n = A,T,C or G
gactggaagagcactgttgaacctcccaccttaccaatcaacttccgttggaggctcatcgttcctattcaggcagatgttatcgaggtccgacnnnnnnccatacgaaaccccgcacaaaaaaccgatcggatacgcatgaggct

SEQ ID NO: 5968 - DNA, 146 bp, Artificial Sequence
  Bisulfite Padlock Probe
  misc_feature 95, 96, 97, 98, 99, 100: n = A,T,C or G
gactggaagagcactgttgaacctcccaccttaccgatcaacttccgttggaggctcatcgttcctattcaggcagatgttatcgaggtccgacnnnnnnccatacgaaaccccgcacgaaaaaccgatcggatacgcatgaggct

SEQ ID NO: 5969 - DNA, 146 bp, Artificial Sequence
  Bisulfite Padlock Probe
  misc_feature 93, 94, 95, 96, 97, 98: n = A,T,C or G
gactggaagagcactgttgaacgaaatcccgaccttacaaccccgttggaggctcatcgttcctattcaggcagatgttatcgaggtccgacnnnnnnctccccaaccttcccaaataaactcttcgatcggatacgcatgaggct

SEQ ID NO: 5970 - DNA, 146 bp, Artificial Sequence
  Bisulfite Padlock Probe
  misc_feature 93, 94, 95, 96, 97, 98: n = A,T,C or G
gactggaagagcactgttgaacgaaatcccgaccttacgaccccgttggaggctcatcgttcctattcaggcagatgttatcgaggtccgacnnnnnnctccccaaccttcccgaataaactcttcgatcggatacgcatgaggct

SEQ ID NO: 5971 - DNA, 146 bp, Artificial Sequence
  Bisulfite Padlock Probe
  misc_feature 92, 93, 94, 95, 96, 97: n = A,T,C or G
gactggaagagcactgttgaacgccgaaaacccgctacatctagttggaggctcatcgttcctattcaggcagatgttatcgaggtccgacnnnnnncaaaaacccgaacgtatacatccaaaaaagatcggatacgcatgaggct

SEQ ID NO: 5972 - DNA, 146 bp, Artificial Sequence
  Bisulfite Padlock Probe
  misc_feature 92, 93, 94, 95, 96, 97: n = A,T,C or G
gactggaagagcactgttgaacgccgaaaacccgctacgtctagttggaggctcatcgttcctattcaggcagatgttatcgaggtccgacnnnnnncaaaaacccgaacgtatacatccgaaaaagatcggatacgcatgaggct

SEQ ID NO: 5973 - DNA, 146 bp, Artificial Sequence
  Bisulfite Padlock Probe
  misc_feature 94, 95, 96, 97, 98, 99: n = A,T,C or G
gactggaagagcactgttgaacgcttcaaactctttaattattttgttggaggctcatcgttcctattcaggcagatgttatcgaggtccgacnnnnnncaaccgccgaacccgactatacgtatcgatcggatacgcatgaggct

SEQ ID NO: 5974 - DNA, 146 bp, Artificial Sequence
  Bisulfite Padlock Probe
  misc_feature 92, 93, 94, 95, 96, 97: n = A,T,C or G
gactggaagagcactgttgaactacgcctcaatatatacccccgttggaggctcatcgttcctattcaggcagatgttatcgaggtccgacnnnnnnaaacttttaaaacgactaactcactaatcgatcggatacgcatgaggct

SEQ ID NO: 5975 - DNA, 146 bp, Artificial Sequence
  Bisulfite Padlock Probe
  misc_feature 92, 93, 94, 95, 96, 97: n = A,T,C or G
gactggaagagcactgttgaactacgcctcgatatatacccccgttggaggctcatcgttcctattcaggcagatgttatcgaggtccgacnnnnnnaaacttttaaaacgactaactcgctaatcgatcggatacgcatgaggct

SEQ ID NO: 5976 - DNA, 146 bp, Artificial Sequence
  Bisulfite Padlock Probe
  misc_feature 95, 96, 97, 98, 99, 100: n = A,T,C or G
gactggaagagcactgttgaactcccacccccatttccaaaatctcgttggaggctcatcgttcctattcaggcagatgttatcgaggtccgacnnnnnngcaaaaacgcgcaccgatcaaaaatcgatcggatacgcatgaggct

SEQ ID NO: 5977 - DNA, 146 bp, Artificial Sequence
  Bisulfite Padlock Probe
  misc_feature 95, 96, 97, 98, 99, 100: n = A,T,C or G
gactggaagagcactgttgaactcccacccccatttccgaaatctcgttggaggctcatcgttcctattcaggcagatgttatcgaggtccgacnnnnnngcaaaaacgcgcaccgatcgaaaatcgatcggatacgcatgaggct

SEQ ID NO: 5978 - DNA, 146 bp, Artificial Sequence
  Bisulfite Padlock Probe
  misc_feature 95, 96, 97, 98, 99, 100: n = A,T,C or G
gactggaagagcactgttgaatcgcccccgaactcaaaacaaaaacgttggaggctcatcgttcctattcaggcagatgttatcgaggtccgacnnnnnnaacctcttaccgcccaaatcgtaccagatcggatacgcatgaggct

SEQ ID NO: 5979 - DNA, 146 bp, Artificial Sequence
  Bisulfite Padlock Probe
  misc_feature 95, 96, 97, 98, 99, 100: n = A,T,C or G
gactggaagagcactgttgaatcgcccccgaactcgaaacaaaaacgttggaggctcatcgttcctattcaggcagatgttatcgaggtccgacnnnnnnaacctcttaccgcccaaatcgtaccggatcggatacgcatgaggct

SEQ ID NO: 5980 - DNA, 146 bp, Artificial Sequence
  Bisulfite Padlock Probe
  misc_feature 92, 93, 94, 95, 96, 97: n = A,T,C or G
gactggaagagcactgttgacaacacccacgaactaacacctcgttggaggctcatcgttcctattcaggcagatgttatcgaggtccgacnnnnnnataaaaacgcgaaatcgcctacaaaaccagatcggatacgcatgaggct

SEQ ID NO: 5981 - DNA, 146 bp, Artificial Sequence
  Bisulfite Padlock Probe
  misc_feature 92, 93, 94, 95, 96, 97: n = A,T,C or G
gactggaagagcactgttgacaacacccacgaactaacgcctcgttggaggctcatcgttcctattcaggcagatgttatcgaggtccgacnnnnnnataaaaacgcgaaatcgcctacaaaaccggatcggatacgcatgaggct

SEQ ID NO: 5982 - DNA, 146 bp, Artificial Sequence
  Bisulfite Padlock Probe
  misc_feature 92, 93, 94, 95, 96, 97: n = A,T,C or G
gactggaagagcactgttgacaatacacgcaacgcactacctcgttggaggctcatcgttcctattcaggcagatgttatcgaggtccgacnnnnnngactcgcaaacgcacgaatccaaaaaatcgatcggatacgcatgaggct

SEQ ID NO: 5983 - DNA, 146 bp, Artificial Sequence
  Bisulfite Padlock Probe
  misc_feature 92, 93, 94, 95, 96, 97: n = A,T,C or G
gactggaagagcactgttgacaatacacgcaacgcgctacctcgttggaggctcatcgttcctattcaggcagatgttatcgaggtccgacnnnnnngactcgcaaacgcacgaatccgaaaaatcgatcggatacgcatgaggct

SEQ ID NO: 5984 - DNA, 146 bp, Artificial Sequence
  Bisulfite Padlock Probe
  misc_feature 92, 93, 94, 95, 96, 97: n = A,T,C or G
gactggaagagcactgttgacacgaccctctaaaccccaaaccgttggaggctcatcgttcctattcaggcagatgttatcgaggtccgacnnnnnnacaaaaccgactactaaaacgcactactagatcggatacgcatgaggct

SEQ ID NO: 5985 - DNA, 146 bp, Artificial Sequence
  Bisulfite Padlock Probe
  misc_feature 92, 93, 94, 95, 96, 97: n = A,T,C or G
gactggaagagcactgttgacacgaccctctaaaccccgaaccgttggaggctcatcgttcctattcaggcagatgttatcgaggtccgacnnnnnnacaaaaccgactactaaaacgcgctactagatcggatacgcatgaggct

SEQ ID NO: 5986 - DNA, 146 bp, Artificial Sequence
  Bisulfite Padlock Probe
  misc_feature 92, 93, 94, 95, 96, 97: n = A,T,C or G
gactggaagagcactgttgacattaaatcctacccaaaataacgttggaggctcatcgttcctattcaggcagatgttatcgaggtccgacnnnnnnacttctacctacgcatccacacaaataccgatcggatacgcatgaggct

SEQ ID NO: 5987 - DNA, 146 bp, Artificial Sequence
  Bisulfite Padlock Probe
  misc_feature 92, 93, 94, 95, 96, 97: n = A,T,C or G
gactggaagagcactgttgaccccaccaatccctaacaacctcgttggaggctcatcgttcctattcaggcagatgttatcgaggtccgacnnnnnntaccacgaaaacgacgaaaccaaaaacacgatcggatacgcatgaggct

SEQ ID NO: 5988 - DNA, 146 bp, Artificial Sequence
  Bisulfite Padlock Probe
  misc_feature 92, 93, 94, 95, 96, 97: n = A,T,C or G
gactggaagagcactgttgaccccaccgatccctaacaacctcgttggaggctcatcgttcctattcaggcagatgttatcgaggtccgacnnnnnntaccacgaaaacgacgaaaccgaaaacacgatcggatacgcatgaggct

SEQ ID NO: 5989 - DNA, 146 bp, Artificial Sequence
  Bisulfite Padlock Probe
  misc_feature 92, 93, 94, 95, 96, 97: n = A,T,C or G
gactggaagagcactgttgaccgaaaccccgaaaacacttctcgttggaggctcatcgttcctattcaggcagatgttatcgaggtccgacnnnnnnctaacctttccaccccaactacactcctagatcggatacgcatgaggct

SEQ ID NO: 5990 - DNA, 146 bp, Artificial Sequence
  Bisulfite Padlock Probe
  misc_feature 92, 93, 94, 95, 96, 97: n = A,T,C or G
gactggaagagcactgttgaccgaaaccccgaaaacgcttctcgttggaggctcatcgttcctattcaggcagatgttatcgaggtccgacnnnnnnctaacctttccaccccaactacgctcctagatcggatacgcatgaggct

SEQ ID NO: 5991 - DNA, 146 bp, Artificial Sequence
  Bisulfite Padlock Probe
  misc_feature 92, 93, 94, 95, 96, 97: n = A,T,C or G
gactggaagagcactgttgacctaacccgaacgctacacacaagttggaggctcatcgttcctattcaggcagatgttatcgaggtccgacnnnnnnaacccatcacctacaaaaccaaccacaaagatcggatacgcatgaggct

SEQ ID NO: 5992 - DNA, 146 bp, Artificial Sequence
  Bisulfite Padlock Probe
  misc_feature 92, 93, 94, 95, 96, 97: n = A,T,C or G
gactggaagagcactgttgacctaacccgaacgctacgcacaagttggaggctcatcgttcctattcaggcagatgttatcgaggtccgacnnnnnnaacccatcacctacaaaaccaaccacaaagatcggatacgcatgaggct

SEQ ID NO: 5993 - DNA, 146 bp, Artificial Sequence
  Bisulfite Padlock Probe
  misc_feature 96, 97, 98, 99, 100, 101: n = A,T,C or G
gactggaagagcactgttgacgaccgtactctccttcaacaccataagttggaggctcatcgttcctattcaggcagatgttatcgaggtccgacnnnnnngaaccaccactccgacctaacaaccgatcggatacgcatgaggct

SEQ ID NO: 5994 - DNA, 146 bp, Artificial Sequence
  Bisulfite Padlock Probe
  misc_feature 96, 97, 98, 99, 100, 101: n = A,T,C or G
gactggaagagcactgttgacgaccgtactctccttcaacaccgtaagttggaggctcatcgttcctattcaggcagatgttatcgaggtccgacnnnnnngaaccaccactccgacctaacgaccgatcggatacgcatgaggct

SEQ ID NO: 5995 - DNA, 146 bp, Artificial Sequence
  Bisulfite Padlock Probe
  misc_feature 92, 93, 94, 95, 96, 97: n = A,T,C or G
gactggaagagcactgttgacgactaccaaaacccaaccctccgttggaggctcatcgttcctattcaggcagatgttatcgaggtccgacnnnnnntttttataccccaaatctttaaaaacccagatcggatacgcatgaggct

SEQ ID NO: 5996 - DNA, 146 bp, Artificial Sequence
  Bisulfite Padlock Probe
  misc_feature 92, 93, 94, 95, 96, 97: n = A,T,C or G
gactggaagagcactgttgacgactaccaaaacccgaccctccgttggaggctcatcgttcctattcaggcagatgttatcgaggtccgacnnnnnntttttataccccaaatctttaaaaacccagatcggatacgcatgaggct

SEQ ID NO: 5997 - DNA, 146 bp, Artificial Sequence
  Bisulfite Padlock Probe
  misc_feature 92, 93, 94, 95, 96, 97: n = A,T,C or G
gactggaagagcactgttgacgcctcgacgtcatcctacaaacgttggaggctcatcgttcctattcaggcagatgttatcgaggtccgacnnnnnngaaccgaaatcgttctcccgatcaacttcgatcggatacgcatgaggct

SEQ ID NO: 5998 - DNA, 146 bp, Artificial Sequence
  Bisulfite Padlock Probe
  misc_feature 92, 93, 94, 95, 96, 97: n = A,T,C or G
gactggaagagcactgttgacgcctcgacgtcgtcctacaaacgttggaggctcatcgttcctattcaggcagatgttatcgaggtccgacnnnnnngaaccgaaatcgttctcccgatcgacttcgatcggatacgcatgaggct

SEQ ID NO: 5999 - DNA, 146 bp, Artificial Sequence
  Bisulfite Padlock Probe
  misc_feature 92, 93, 94, 95, 96, 97: n = A,T,C or G
gactggaagagcactgttgacgttaaatcctacccaaaataacgttggaggctcatcgttcctattcaggcagatgttatcgaggtccgacnnnnnnacttctacctacgcatccacgcaaataccgatcggatacgcatgaggct

SEQ ID NO: 6000 - DNA, 146 bp, Artificial Sequence
  Bisulfite Padlock Probe
  misc_feature 96, 97, 98, 99, 100, 101: n = A,T,C or G
gactggaagagcactgttgactaaatcatatttaacaacctcaaaaagttggaggctcatcgttcctattcaggcagatgttatcgaggtccgacnnnnnnaaaaaccgaatactcgccgcctaccgatcggatacgcatgaggct

SEQ ID NO: 6001 - DNA, 146 bp, Artificial Sequence
  Bisulfite Padlock Probe
  misc_feature 93, 94, 95, 96, 97, 98: n = A,T,C or G
gactggaagagcactgttgactaacgaccgcgacacctaaaaacgttggaggctcatcgttcctattcaggcagatgttatcgaggtccgacnnnnnncaaacaactcccaacacccctactaacagatcggatacgcatgaggct

SEQ ID NO: 6002 - DNA, 146 bp, Artificial Sequence
  Bisulfite Padlock Probe
  misc_feature 93, 94, 95, 96, 97, 98: n = A,T,C or G
gactggaagagcactgttgactaacgaccgcgacgcctaaaaacgttggaggctcatcgttcctattcaggcagatgttatcgaggtccgacnnnnnncaaacaactcccaacgcccctactaacagatcggatacgcatgaggct

SEQ ID NO: 6003 - DNA, 146 bp, Artificial Sequence
  Bisulfite Padlock Probe
  misc_feature 93, 94, 95, 96, 97, 98: n = A,T,C or G
gactggaagagcactgttgactactaaaaaccgtccctcaccccgttggaggctcatcgttcctattcaggcagatgttatcgaggtccgacnnnnnncctctccccctccctaaaactctcaaccgatcggatacgcatgaggct

SEQ ID NO: 6004 - DNA, 146 bp, Artificial Sequence
  Bisulfite Padlock Probe
  misc_feature 93, 94, 95, 96, 97, 98: n = A,T,C or G
gactggaagagcactgttgactactaaaaaccgtccctcgccccgttggaggctcatcgttcctattcaggcagatgttatcgaggtccgacnnnnnncctctccccctccctaaaactctcaaccgatcggatacgcatgaggct

SEQ ID NO: 6005 - DNA, 146 bp, Artificial Sequence
  Bisulfite Padlock Probe
  misc_feature 94, 95, 96, 97, 98, 99: n = A,T,C or G
gactggaagagcactgttgactccaacgactacaacgtcaccatcgttggaggctcatcgttcctattcaggcagatgttatcgaggtccgacnnnnnngaacccgacttcgtcctcgacaatatcgatcggatacgcatgaggct

SEQ ID NO: 6006 - DNA, 146 bp, Artificial Sequence
  Bisulfite Padlock Probe
  misc_feature 94, 95, 96, 97, 98, 99: n = A,T,C or G
gactggaagagcactgttgactccaacgactacaacgtcgccatcgttggaggctcatcgttcctattcaggcagatgttatcgaggtccgacnnnnnngaacccgacttcgtcctcgacgatatcgatcggatacgcatgaggct

SEQ ID NO: 6007 - DNA, 146 bp, Artificial Sequence
  Bisulfite Padlock Probe
  misc_feature 96, 97, 98, 99, 100, 101: n = A,T,C or G
gactggaagagcactgttgataaactccgccgaccgcaaaataaaacgttggaggctcatcgttcctattcaggcagatgttatcgaggtccgacnnnnnnacccaaaatatcctcaatataaaaagatcggatacgcatgaggct

SEQ ID NO: 6008 - DNA, 146 bp, Artificial Sequence
  Bisulfite Padlock Probe
  misc_feature 96, 97, 98, 99, 100, 101: n = A,T,C or G
gactggaagagcactgttgataaactccgccgaccgcgaaataaaacgttggaggctcatcgttcctattcaggcagatgttatcgaggtccgacnnnnnnacccaaaatatcctcgatataaaaagatcggatacgcatgaggct

SEQ ID NO: 6009 - DNA, 146 bp, Artificial Sequence
  Bisulfite Padlock Probe
  misc_feature 96, 97, 98, 99, 100, 101: n = A,T,C or G
gactggaagagcactgttgatataaccctaacattaaatttataactgttggaggctcatcgttcctattcaggcagatgttatcgaggtccgacnnnnnnaacgttccgtccgacaaataaccccgatcggatacgcatgaggct

SEQ ID NO: 6010 - DNA, 146 bp, Artificial Sequence
  Bisulfite Padlock Probe
  misc_feature 96, 97, 98, 99, 100, 101: n = A,T,C or G
gactggaagagcactgttgatataaccctaacgttaaatttataactgttggaggctcatcgttcctattcaggcagatgttatcgaggtccgacnnnnnnaacgttccgtccgacgaataaccccgatcggatacgcatgaggct

SEQ ID NO: 6011 - DNA, 146 bp, Artificial Sequence
  Bisulfite Padlock Probe
  misc_feature 92, 93, 94, 95, 96, 97: n = A,T,C or G
gactggaagagcactgttgatccttctcaacgccctacccaacgttggaggctcatcgttcctattcaggcagatgttatcgaggtccgacnnnnnnaaaaatataaaaacaaaatttttactacagatcggatacgcatgaggct

SEQ ID NO: 6012 - DNA, 146 bp, Artificial Sequence
  Bisulfite Padlock Probe
  misc_feature 92, 93, 94, 95, 96, 97: n = A,T,C or G
gactggaagagcactgttgatccttctcaacgccctacccgacgttggaggctcatcgttcctattcaggcagatgttatcgaggtccgacnnnnnnaaaaatataaaaacaaaatttttactacggatcggatacgcatgaggct

SEQ ID NO: 6013 - DNA, 146 bp, Artificial Sequence
  Bisulfite Padlock Probe
  misc_feature 92, 93, 94, 95, 96, 97: n = A,T,C or G
gactggaagagcactgttgatcgcaaatacacgcgcataacccgttggaggctcatcgttcctattcaggcagatgttatcgaggtccgacnnnnnnccaactcctacgctaattccattactcttgatcggatacgcatgaggct

SEQ ID NO: 6014 - DNA, 146 bp, Artificial Sequence
  Bisulfite Padlock Probe
  misc_feature 92, 93, 94, 95, 96, 97: n = A,T,C or G
gactggaagagcactgttgatcgcaaatacacgcgcgtaacccgttggaggctcatcgttcctattcaggcagatgttatcgaggtccgacnnnnnnccaactcctacgctaattccgttactcttgatcggatacgcatgaggct

SEQ ID NO: 6015 - DNA, 146 bp, Artificial Sequence
  Bisulfite Padlock Probe
  misc_feature 92, 93, 94, 95, 96, 97: n = A,T,C or G
gactggaagagcactgttgatcgctcacaaaacccgtacacacgttggaggctcatcgttcctattcaggcagatgttatcgaggtccgacnnnnnnacaaatacgaacgtaaacacaactccacagatcggatacgcatgaggct

SEQ ID NO: 6016 - DNA, 146 bp, Artificial Sequence
  Bisulfite Padlock Probe
  misc_feature 92, 93, 94, 95, 96, 97: n = A,T,C or G
gactggaagagcactgttgatcgctcacaaaacccgtacgcacgttggaggctcatcgttcctattcaggcagatgttatcgaggtccgacnnnnnnacaaatacgaacgtaaacgcaactccacagatcggatacgcatgaggct

SEQ ID NO: 6017 - DNA, 146 bp, Artificial Sequence
  Bisulfite Padlock Probe
  misc_feature 92, 93, 94, 95, 96, 97: n = A,T,C or G
gactggaagagcactgttgatttcatccttttccttcctccacgttggaggctcatcgttcctattcaggcagatgttatcgaggtccgacnnnnnnaaaactcaaaactaacccaaataaaccccgatcggatacgcatgaggct

SEQ ID NO: 6018 - DNA, 146 bp, Artificial Sequence
  Bisulfite Padlock Probe
  misc_feature 93, 94, 95, 96, 97, 98: n = A,T,C or G
gactggaagagcactgttgcactaaaaccacccctcccaaaaaagttggaggctcatcgttcctattcaggcagatgttatcgaggtccgacnnnnnntcaacctttacctctctacccccttcccgatcggatacgcatgaggct

SEQ ID NO: 6019 - DNA, 146 bp, Artificial Sequence
  Bisulfite Padlock Probe
  misc_feature 93, 94, 95, 96, 97, 98: n = A,T,C or G
gactggaagagcactgttgcactaaaaccacccctcccgaaaaagttggaggctcatcgttcctattcaggcagatgttatcgaggtccgacnnnnnntcaacctttacctctctacccccttcccgatcggatacgcatgaggct

SEQ ID NO: 6020 - DNA, 146 bp, Artificial Sequence
  Bisulfite Padlock Probe
  misc_feature 96, 97, 98, 99, 100, 101: n = A,T,C or G
gactggaagagcactgttgcactacgaaaaacattacccgcaaaaaagttggaggctcatcgttcctattcaggcagatgttatcgaggtccgacnnnnnncgaatacccctaccccacctaaaccgatcggatacgcatgaggct

SEQ ID NO: 6021 - DNA, 146 bp, Artificial Sequence
  Bisulfite Padlock Probe
  misc_feature 96, 97, 98, 99, 100, 101: n = A,T,C or G
gactggaagagcactgttgcactacgaaaaacattacccgcgaaaaagttggaggctcatcgttcctattcaggcagatgttatcgaggtccgacnnnnnncgaatacccctaccccgcctaaaccgatcggatacgcatgaggct

SEQ ID NO: 6022 - DNA, 146 bp, Artificial Sequence
  Bisulfite Padlock Probe
  misc_feature 92, 93, 94, 95, 96, 97: n = A,T,C or G
gactggaagagcactgttgccaacctcaactctaaaccctcttgttggaggctcatcgttcctattcaggcagatgttatcgaggtccgacnnnnnnataacgaaacaataactccctaaacactagatcggatacgcatgaggct

SEQ ID NO: 6023 - DNA, 146 bp, Artificial Sequence
  Bisulfite Padlock Probe
  misc_feature 92, 93, 94, 95, 96, 97: n = A,T,C or G
gactggaagagcactgttgccaacctcgactctaaaccctcttgttggaggctcatcgttcctattcaggcagatgttatcgaggtccgacnnnnnnataacgaaacaataactccctaaacgctagatcggatacgcatgaggct

SEQ ID NO: 6024 - DNA, 146 bp, Artificial Sequence
  Bisulfite Padlock Probe
  misc_feature 92, 93, 94, 95, 96, 97: n = A,T,C or G
gactggaagagcactgttgcccccgaaaacgcataaccaaaaagttggaggctcatcgttcctattcaggcagatgttatcgaggtccgacnnnnnnaaaaacgccaaacccgaaataaacgtcaagatcggatacgcatgaggct

SEQ ID NO: 6025 - DNA, 146 bp, Artificial Sequence
  Bisulfite Padlock Probe
  misc_feature 92, 93, 94, 95, 96, 97: n = A,T,C or G
gactggaagagcactgttgcccccgaaaacgcgtaaccaaaaagttggaggctcatcgttcctattcaggcagatgttatcgaggtccgacnnnnnnaaaaacgccaaacccgaaataaacgtcgagatcggatacgcatgaggct

SEQ ID NO: 6026 - DNA, 146 bp, Artificial Sequence
  Bisulfite Padlock Probe
  misc_feature 92, 93, 94, 95, 96, 97: n = A,T,C or G
gactggaagagcactgttgccgattcgaccacctttccaaaaagttggaggctcatcgttcctattcaggcagatgttatcgaggtccgacnnnnnnaacttttctaaacgaaaaacaaaacacccgatcggatacgcatgaggct

SEQ ID NO: 6027 - DNA, 146 bp, Artificial Sequence
  Bisulfite Padlock Probe
  misc_feature 92, 93, 94, 95, 96, 97: n = A,T,C or G
gactggaagagcactgttgccgattcgaccgcctttccaaaaagttggaggctcatcgttcctattcaggcagatgttatcgaggtccgacnnnnnnaacttttctaaacgaaaaacaaaacgcccgatcggatacgcatgaggct

SEQ ID NO: 6028 - DNA, 146 bp, Artificial Sequence
  Bisulfite Padlock Probe
  misc_feature 95, 96, 97, 98, 99, 100: n = A,T,C or G
gactggaagagcactgttgccgccgactccgactttatacaaaaaagttggaggctcatcgttcctattcaggcagatgttatcgaggtccgacnnnnnncgtaacgactacgctcgaacccaatcgatcggatacgcatgaggct

SEQ ID NO: 6029 - DNA, 146 bp, Artificial Sequence
  Bisulfite Padlock Probe
  misc_feature 95, 96, 97, 98, 99, 100: n = A,T,C or G
gactggaagagcactgttgccgccgactccgactttatacgaaaaagttggaggctcatcgttcctattcaggcagatgttatcgaggtccgacnnnnnncgtaacgactacgctcgaacccgatcgatcggatacgcatgaggct

SEQ ID NO: 6030 - DNA, 146 bp, Artificial Sequence
  Bisulfite Padlock Probe
  misc_feature 94, 95, 96, 97, 98, 99: n = A,T,C or G
gactggaagagcactgttgcctcccaataaatcccccaataacccgttggaggctcatcgttcctattcaggcagatgttatcgaggtccgacnnnnnnctccaactcatacaccttaaccaaaaagatcggatacgcatgaggct

SEQ ID NO: 6031 - DNA, 146 bp, Artificial Sequence
  Bisulfite Padlock Probe
  misc_feature 96, 97, 98, 99, 100, 101: n = A,T,C or G
gactggaagagcactgttgcgaaaccaacctacgaatcaaccataacgttggaggctcatcgttcctattcaggcagatgttatcgaggtccgacnnnnnncgaacatcccgaaaaacgcacctacgatcggatacgcatgaggct

SEQ ID NO: 6032 - DNA, 146 bp, Artificial Sequence
  Bisulfite Padlock Probe
  misc_feature 96, 97, 98, 99, 100, 101: n = A,T,C or G
gactggaagagcactgttgcgaaaccaacctacgaatcgaccataacgttggaggctcatcgttcctattcaggcagatgttatcgaggtccgacnnnnnncgaacatcccgaaaaacgcgcctacgatcggatacgcatgaggct

SEQ ID NO: 6033 - DNA, 146 bp, Artificial Sequence
  Bisulfite Padlock Probe
  misc_feature 93, 94, 95, 96, 97, 98: n = A,T,C or G
gactggaagagcactgttgcgaccgaaaacacttcctccaaaaagttggaggctcatcgttcctattcaggcagatgttatcgaggtccgacnnnnnnctcgactaaacctcaaccatacccaaccgatcggatacgcatgaggct

SEQ ID NO: 6034 - DNA, 146 bp, Artificial Sequence
  Bisulfite Padlock Probe
  misc_feature 93, 94, 95, 96, 97, 98: n = A,T,C or G
gactggaagagcactgttgcgaccgaaaacgcttcctccaaaaagttggaggctcatcgttcctattcaggcagatgttatcgaggtccgacnnnnnnctcgactaaacctcgaccatacccaaccgatcggatacgcatgaggct

SEQ ID NO: 6035 - DNA, 146 bp, Artificial Sequence
  Bisulfite Padlock Probe
  misc_feature 92, 93, 94, 95, 96, 97: n = A,T,C or G
gactggaagagcactgttgcgctcgaaacgacaaccatacaacgttggaggctcatcgttcctattcaggcagatgttatcgaggtccgacnnnnnnccctccaaaccccaataaatcatctcattgatcggatacgcatgaggct

SEQ ID NO: 6036 - DNA, 146 bp, Artificial Sequence
  Bisulfite Padlock Probe
  misc_feature 92, 93, 94, 95, 96, 97: n = A,T,C or G
gactggaagagcactgttgcgctcgaaacgacaaccgtacaacgttggaggctcatcgttcctattcaggcagatgttatcgaggtccgacnnnnnnccctccaaaccccaataaatcatctcgttgatcggatacgcatgaggct

SEQ ID NO: 6037 - DNA, 146 bp, Artificial Sequence
  Bisulfite Padlock Probe
  misc_feature 96, 97, 98, 99, 100, 101: n = A,T,C or G
gactggaagagcactgttgctactcgcccacaaatcacactaaattcgttggaggctcatcgttcctattcaggcagatgttatcgaggtccgacnnnnnncaacctcgccgaaaacttcactctcgatcggatacgcatgaggct

SEQ ID NO: 6038 - DNA, 146 bp, Artificial Sequence
  Bisulfite Padlock Probe
  misc_feature 96, 97, 98, 99, 100, 101: n = A,T,C or G
gactggaagagcactgttgctactcgcccacaaatcgcactaaattcgttggaggctcatcgttcctattcaggcagatgttatcgaggtccgacnnnnnncaacctcgccgaaaacttcgctctcgatcggatacgcatgaggct

SEQ ID NO: 6039 - DNA, 146 bp, Artificial Sequence
  Bisulfite Padlock Probe
  misc_feature 96, 97, 98, 99, 100, 101: n = A,T,C or G
gactggaagagcactgttgctcgacctaataaccaaaatcaaaaaccgttggaggctcatcgttcctattcaggcagatgttatcgaggtccgacnnnnnngaaccctacctctccccaccaaaaagatcggatacgcatgaggct

SEQ ID NO: 6040 - DNA, 146 bp, Artificial Sequence
  Bisulfite Padlock Probe
  misc_feature 96, 97, 98, 99, 100, 101: n = A,T,C or G
gactggaagagcactgttgctcgacctaataaccaaaatcgaaaaccgttggaggctcatcgttcctattcaggcagatgttatcgaggtccgacnnnnnngaaccctacctctccccgccaaaaagatcggatacgcatgaggct

SEQ ID NO: 6041 - DNA, 146 bp, Artificial Sequence
  Bisulfite Padlock Probe
  misc_feature 92, 93, 94, 95, 96, 97: n = A,T,C or G
gactggaagagcactgttgctctcccgaacctactccaaaatcgttggaggctcatcgttcctattcaggcagatgttatcgaggtccgacnnnnnnctccttcccctactcttcattcctaaaaagatcggatacgcatgaggct

SEQ ID NO: 6042 - DNA, 146 bp, Artificial Sequence
  Bisulfite Padlock Probe
  misc_feature 92, 93, 94, 95, 96, 97: n = A,T,C or G
gactggaagagcactgttgctctcccgaacctactccgaaatcgttggaggctcatcgttcctattcaggcagatgttatcgaggtccgacnnnnnnctccttcccctactcttcgttcctaaaaagatcggatacgcatgaggct

SEQ ID NO: 6043 - DNA, 146 bp, Artificial Sequence
  Bisulfite Padlock Probe
  misc_feature 92, 93, 94, 95, 96, 97: n = A,T,C or G
gactggaagagcactgttgttccgcccccaccactaatactacgttggaggctcatcgttcctattcaggcagatgttatcgaggtccgacnnnnnnacgaaataaaatctaataaaacccacaccgatcggatacgcatgaggct

SEQ ID NO: 6044 - DNA, 146 bp, Artificial Sequence
  Bisulfite Padlock Probe
  misc_feature 92, 93, 94, 95, 96, 97: n = A,T,C or G
gactggaagagcactgttgttccgcccccaccgctaatactacgttggaggctcatcgttcctattcaggcagatgttatcgaggtccgacnnnnnnacgaaataaaatctaataaaacccacgccgatcggatacgcatgaggct

SEQ ID NO: 6045 - DNA, 146 bp, Artificial Sequence
  Bisulfite Padlock Probe
  misc_feature 94, 95, 96, 97, 98, 99: n = A,T,C or G
gactggaagagcactgtttaaaaacaaaaacaaaaactaaaactcgttggaggctcatcgttcctattcaggcagatgttatcgaggtccgacnnnnnncccacctaccctaacaacactaaaaccgatcggatacgcatgaggct

SEQ ID NO: 6046 - DNA, 146 bp, Artificial Sequence
  Bisulfite Padlock Probe
  misc_feature 93, 94, 95, 96, 97, 98: n = A,T,C or G
gactggaagagcactgtttaaaaacaataaacgaccgcatccccgttggaggctcatcgttcctattcaggcagatgttatcgaggtccgacnnnnnntccaactatccgtaaccaaattataacagatcggatacgcatgaggct

SEQ ID NO: 6047 - DNA, 146 bp, Artificial Sequence
  Bisulfite Padlock Probe
  misc_feature 93, 94, 95, 96, 97, 98: n = A,T,C or G
gactggaagagcactgtttaaaaacaataaacgaccgcgtccccgttggaggctcatcgttcctattcaggcagatgttatcgaggtccgacnnnnnntccaactatccgtaaccgaattataacagatcggatacgcatgaggct

SEQ ID NO: 6048 - DNA, 146 bp, Artificial Sequence
  Bisulfite Padlock Probe
  misc_feature 94, 95, 96, 97, 98, 99: n = A,T,C or G
gactggaagagcactgtttaaaaacccaccgcataccaatacaaagttggaggctcatcgttcctattcaggcagatgttatcgaggtccgacnnnnnnaaccaactcaaccctaccaacccaaccgatcggatacgcatgaggct

SEQ ID NO: 6049 - DNA, 146 bp, Artificial Sequence
  Bisulfite Padlock Probe
  misc_feature 94, 95, 96, 97, 98, 99: n = A,T,C or G
gactggaagagcactgtttaaaaacccaccgcataccgatacaaagttggaggctcatcgttcctattcaggcagatgttatcgaggtccgacnnnnnnaaccaactcaaccctaccaacccaaccgatcggatacgcatgaggct

SEQ ID NO: 6050 - DNA, 146 bp, Artificial Sequence
  Bisulfite Padlock Probe
  misc_feature 92, 93, 94, 95, 96, 97: n = A,T,C or G
gactggaagagcactgtttaaaaactaaaaacgacaatttcctgttggaggctcatcgttcctattcaggcagatgttatcgaggtccgacnnnnnnaaacccctaaatccccaataccctcaaccgatcggatacgcatgaggct

SEQ ID NO: 6051 - DNA, 146 bp, Artificial Sequence
  Bisulfite Padlock Probe
  misc_feature 92, 93, 94, 95, 96, 97: n = A,T,C or G
gactggaagagcactgtttaaaaactaaaaacgacgatttcctgttggaggctcatcgttcctattcaggcagatgttatcgaggtccgacnnnnnnaaacccctaaatccccaataccctcaaccgatcggatacgcatgaggct

SEQ ID NO: 6052 - DNA, 146 bp, Artificial Sequence
  Bisulfite Padlock Probe
  misc_feature 94, 95, 96, 97, 98, 99: n = A,T,C or G
gactggaagagcactgtttaaaaacttaaaacgtatccaaaaaccgttggaggctcatcgttcctattcaggcagatgttatcgaggtccgacnnnnnnaccgaatctaacgaacaaaaaataattgatcggatacgcatgaggct

SEQ ID NO: 6053 - DNA, 146 bp, Artificial Sequence
  Bisulfite Padlock Probe
  misc_feature 94, 95, 96, 97, 98, 99: n = A,T,C or G
gactggaagagcactgtttaaaaacttaaaacgtatccgaaaaccgttggaggctcatcgttcctattcaggcagatgttatcgaggtccgacnnnnnnaccgaatctaacgaacgaaaaataattgatcggatacgcatgaggct

SEQ ID NO: 6054 - DNA, 146 bp, Artificial Sequence
  Bisulfite Padlock Probe
  misc_feature 92, 93, 94, 95, 96, 97: n = A,T,C or G
gactggaagagcactgtttaaaaacttaatactttaaactctcgttggaggctcatcgttcctattcaggcagatgttatcgaggtccgacnnnnnnaaaattccgaaaccacgcgacaaaaaacagatcggatacgcatgaggct

SEQ ID NO: 6055 - DNA, 146 bp, Artificial Sequence
  Bisulfite Padlock Probe
  misc_feature 92, 93, 94, 95, 96, 97: n = A,T,C or G
gactggaagagcactgtttaaaaacttaatactttaaactctcgttggaggctcatcgttcctattcaggcagatgttatcgaggtccgacnnnnnnaaaattccgaaaccacgcgacgaaaaacagatcggatacgcatgaggct

SEQ ID NO: 6056 - DNA, 146 bp, Artificial Sequence
  Bisulfite Padlock Probe
  misc_feature 93, 94, 95, 96, 97, 98: n = A,T,C or G
gactggaagagcactgtttaaaaataaaaacaatacacaacatagttggaggctcatcgttcctattcaggcagatgttatcgaggtccgacnnnnnntaaacaacaactaccgacaactcccaccgatcggatacgcatgaggct

SEQ ID NO: 6057 - DNA, 146 bp, Artificial Sequence
  Bisulfite Padlock Probe
  misc_feature 93, 94, 95, 96, 97, 98: n = A,T,C or G
gactggaagagcactgtttaaaaataaaaaccaactaaccacccgttggaggctcatcgttcctattcaggcagatgttatcgaggtccgacnnnnnncccccaacaaaattctacacttccaaccgatcggatacgcatgaggct

SEQ ID NO: 6058 - DNA, 146 bp, Artificial Sequence
  Bisulfite Padlock Probe
  misc_feature 93, 94, 95, 96, 97, 98: n = A,T,C or G
gactggaagagcactgtttaaaaataaaaaccgactaaccacccgttggaggctcatcgttcctattcaggcagatgttatcgaggtccgacnnnnnncccccaacgaaattctacacttccaaccgatcggatacgcatgaggct

SEQ ID NO: 6059 - DNA, 146 bp, Artificial Sequence
  Bisulfite Padlock Probe
  misc_feature 93, 94, 95, 96, 97, 98: n = A,T,C or G
gactggaagagcactgtttaaaaataaaaacgatacacaacatagttggaggctcatcgttcctattcaggcagatgttatcgaggtccgacnnnnnntaaacaacaactaccgacgactcccaccgatcggatacgcatgaggct

SEQ ID NO: 6060 - DNA, 146 bp, Artificial Sequence
  Bisulfite Padlock Probe
  misc_feature 96, 97, 98, 99, 100, 101: n = A,T,C or G
gactggaagagcactgtttaaaaatcaaatcatcaaaattaatataagttggaggctcatcgttcctattcaggcagatgttatcgaggtccgacnnnnnnacctccgaaacctcctcacctctaagatcggatacgcatgaggct

SEQ ID NO: 6061 - DNA, 146 bp, Artificial Sequence
  Bisulfite Padlock Probe
  misc_feature 96, 97, 98, 99, 100, 101: n = A,T,C or G
gactggaagagcactgtttaaaaatcaaatcatcaaaattaatataagttggaggctcatcgttcctattcaggcagatgttatcgaggtccgacnnnnnnacctccgaaacctcctcgcctctaagatcggatacgcatgaggct

SEQ ID NO: 6062 - DNA, 146 bp, Artificial Sequence
  Bisulfite Padlock Probe
  misc_feature 94, 95, 96, 97, 98, 99: n = A,T,C or G
gactggaagagcactgtttaaaaatccgcaaatcccccacctctcgttggaggctcatcgttcctattcaggcagatgttatcgaggtccgacnnnnnnaataccttccaaccctaaacaaaccccgatcggatacgcatgaggct

SEQ ID NO: 6063 - DNA, 146 bp, Artificial Sequence
  Bisulfite Padlock Probe
  misc_feature 94, 95, 96, 97, 98, 99: n = A,T,C or G
gactggaagagcactgtttaaaaatccgcgaatcccccacctctcgttggaggctcatcgttcctattcaggcagatgttatcgaggtccgacnnnnnnaataccttccgaccctaaacaaaccccgatcggatacgcatgaggct

SEQ ID NO: 6064 - DNA, 146 bp, Artificial Sequence
  Bisulfite Padlock Probe
  misc_feature 92, 93, 94, 95, 96, 97: n = A,T,C or G
gactggaagagcactgtttaaaacaaaaatcgcaaccaaacccgttggaggctcatcgttcctattcaggcagatgttatcgaggtccgacnnnnnntaactcaaattaattttcctacaccttacgatcggatacgcatgaggct

SEQ ID NO: 6065 - DNA, 146 bp, Artificial Sequence
  Bisulfite Padlock Probe
  misc_feature 92, 93, 94, 95, 96, 97: n = A,T,C or G
gactggaagagcactgtttaaaacaaaaatcgcaaccgaacccgttggaggctcatcgttcctattcaggcagatgttatcgaggtccgacnnnnnntaactcaaattaattttcctacaccttacgatcggatacgcatgaggct

SEQ ID NO: 6066 - DNA, 146 bp, Artificial Sequence
  Bisulfite Padlock Probe
  misc_feature 92, 93, 94, 95, 96, 97: n = A,T,C or G
gactggaagagcactgtttaaaacaaaatttccacaacaatacgttggaggctcatcgttcctattcaggcagatgttatcgaggtccgacnnnnnnctaacactttacacttaactactattactgatcggatacgcatgaggct

SEQ ID NO: 6067 - DNA, 146 bp, Artificial Sequence
  Bisulfite Padlock Probe
  misc_feature 92, 93, 94, 95, 96, 97: n = A,T,C or G
gactggaagagcactgtttaaaacaaaatttccgcaacaatacgttggaggctcatcgttcctattcaggcagatgttatcgaggtccgacnnnnnnctaacactttacacttaactactattactgatcggatacgcatgaggct

SEQ ID NO: 6068 - DNA, 146 bp, Artificial Sequence
  Bisulfite Padlock Probe
  misc_feature 94, 95, 96, 97, 98, 99: n = A,T,C or G
gactggaagagcactgtttaaaaccacaaaacaaataacaactaagttggaggctcatcgttcctattcaggcagatgttatcgaggtccgacnnnnnnactcgaactccgaaaacaccaaaaacagatcggatacgcatgaggct

SEQ ID NO: 6069 - DNA, 146 bp, Artificial Sequence
  Bisulfite Padlock Probe
  misc_feature 94, 95, 96, 97, 98, 99: n = A,T,C or G
gactggaagagcactgtttaaaaccacaaaacaaataacaactaagttggaggctcatcgttcctattcaggcagatgttatcgaggtccgacnnnnnnactcgaactccgaaaacgccaaaaacagatcggatacgcatgaggct

SEQ ID NO: 6070 - DNA, 146 bp, Artificial Sequence
  Bisulfite Padlock Probe
  misc_feature 95, 96, 97, 98, 99, 100: n = A,T,C or G
gactggaagagcactgtttaaaacccataacattatatataaataagttggaggctcatcgttcctattcaggcagatgttatcgaggtccgacnnnnnnctaaatacgatcttcaaataaacacagatcggatacgcatgaggct

SEQ ID NO: 6071 - DNA, 146 bp, Artificial Sequence
  Bisulfite Padlock Probe
  misc_feature 95, 96, 97, 98, 99, 100: n = A,T,C or G
gactggaagagcactgtttaaaacccataacattatatataaataagttggaggctcatcgttcctattcaggcagatgttatcgaggtccgacnnnnnnctaaatacgatcttcaaataaacgcagatcggatacgcatgaggct

SEQ ID NO: 6072 - DNA, 146 bp, Artificial Sequence
  Bisulfite Padlock Probe
  misc_feature 96, 97, 98, 99, 100, 101: n = A,T,C or G
gactggaagagcactgtttaaaacctacgaaaacaaaacaaccaaaagttggaggctcatcgttcctattcaggcagatgttatcgaggtccgacnnnnnngattacactcccaacacttaaaaccgatcggatacgcatgaggct

SEQ ID NO: 6073 - DNA, 146 bp, Artificial Sequence
  Bisulfite Padlock Probe
  misc_feature 96, 97, 98, 99, 100, 101: n = A,T,C or G
gactggaagagcactgtttaaaacctacgaaaacaaaacgaccaaaagttggaggctcatcgttcctattcaggcagatgttatcgaggtccgacnnnnnngattacactcccaacgcttaaaaccgatcggatacgcatgaggct

SEQ ID NO: 6074 - DNA, 146 bp, Artificial Sequence
  Bisulfite Padlock Probe
  misc_feature 95, 96, 97, 98, 99, 100: n = A,T,C or G
gactggaagagcactgtttaaaacctatacaaaaactaaacttaacgttggaggctcatcgttcctattcaggcagatgttatcgaggtccgacnnnnnncgaaaactcctacctctacaaaactcgatcggatacgcatgaggct

SEQ ID NO: 6075 - DNA, 146 bp, Artificial Sequence
  Bisulfite Padlock Probe
  misc_feature 95, 96, 97, 98, 99, 100: n = A,T,C or G
gactggaagagcactgtttaaaacctatacaaaaactaaacttaacgttggaggctcatcgttcctattcaggcagatgttatcgaggtccgacnnnnnncgaaaactcctacctctacgaaactcgatcggatacgcatgaggct

SEQ ID NO: 6076 - DNA, 146 bp, Artificial Sequence
  Bisulfite Padlock Probe
  misc_feature 93, 94, 95, 96, 97, 98: n = A,T,C or G
gactggaagagcactgtttaaaacctcccttaccatctctcctcgttggaggctcatcgttcctattcaggcagatgttatcgaggtccgacnnnnnntacccaacataataaccaccaaatataagatcggatacgcatgaggct

SEQ ID NO: 6077 - DNA, 146 bp, Artificial Sequence
  Bisulfite Padlock Probe
  misc_feature 93, 94, 95, 96, 97, 98: n = A,T,C or G
gactggaagagcactgtttaaaacctcccttaccgtctctcctcgttggaggctcatcgttcctattcaggcagatgttatcgaggtccgacnnnnnntacccaacataataaccaccgaatataagatcggatacgcatgaggct

SEQ ID NO: 6078 - DNA, 146 bp, Artificial Sequence
  Bisulfite Padlock Probe
  misc_feature 92, 93, 94, 95, 96, 97: n = A,T,C or G
gactggaagagcactgtttaaaacgccaaaaaatttctcactcgttggaggctcatcgttcctattcaggcagatgttatcgaggtccgacnnnnnnaaataaattctccgcaaatataatatcccgatcggatacgcatgaggct

SEQ ID NO: 6079 - DNA, 146 bp, Artificial Sequence
  Bisulfite Padlock Probe
  misc_feature 94, 95, 96, 97, 98, 99: n = A,T,C or G
gactggaagagcactgtttaaaacgccaccctaaaaccacctaacgttggaggctcatcgttcctattcaggcagatgttatcgaggtccgacnnnnnnacactctactatttccaataccacctcgatcggatacgcatgaggct

SEQ ID NO: 6080 - DNA, 146 bp, Artificial Sequence
  Bisulfite Padlock Probe
  misc_feature 94, 95, 96, 97, 98, 99: n = A,T,C or G
gactggaagagcactgtttaaaacgcccctacacaaacataaacagttggaggctcatcgttcctattcaggcagatgttatcgaggtccgacnnnnnnccgaaaccgcgaaaaacaacaaaaaccgatcggatacgcatgaggct

SEQ ID NO: 6081 - DNA, 146 bp, Artificial Sequence
  Bisulfite Padlock Probe
  misc_feature 94, 95, 96, 97, 98, 99: n = A,T,C or G
gactggaagagcactgtttaaaacgcccctacacaaacataaacggttggaggctcatcgttcctattcaggcagatgttatcgaggtccgacnnnnnnccgaaaccgcgaaaaacaacgaaaaccgatcggatacgcatgaggct

SEQ ID NO: 6082 - DNA, 146 bp, Artificial Sequence
  Bisulfite Padlock Probe
  misc_feature 92, 93, 94, 95, 96, 97: n = A,T,C or G
gactggaagagcactgtttaaaacgccgaaaaatttctcactcgttggaggctcatcgttcctattcaggcagatgttatcgaggtccgacnnnnnnaaataaattctccgcgaatataatatcccgatcggatacgcatgaggct

SEQ ID NO: 6083 - DNA, 146 bp, Artificial Sequence
  Bisulfite Padlock Probe
  misc_feature 94, 95, 96, 97, 98, 99: n = A,T,C or G
gactggaagagcactgtttaaaacgccgccctaaaaccacctaacgttggaggctcatcgttcctattcaggcagatgttatcgaggtccgacnnnnnnacactctactatttccaataccacctcgatcggatacgcatgaggct

SEQ ID NO: 6084 - DNA, 146 bp, Artificial Sequence
  Bisulfite Padlock Probe
  misc_feature 95, 96, 97, 98, 99, 100: n = A,T,C or G
gactggaagagcactgtttaaaacgctccgaaacgacaacctctacgttggaggctcatcgttcctattcaggcagatgttatcgaggtccgacnnnnnnaaaaacaaacgaccgctaacccattcgatcggatacgcatgaggct

SEQ ID NO: 6085 - DNA, 146 bp, Artificial Sequence
  Bisulfite Padlock Probe
  misc_feature 95, 96, 97, 98, 99, 100: n = A,T,C or G
gactggaagagcactgtttaaaacgctccgaaacgacgacctctacgttggaggctcatcgttcctattcaggcagatgttatcgaggtccgacnnnnnnaaaaacaaacgaccgctaacccgttcgatcggatacgcatgaggct

SEQ ID NO: 6086 - DNA, 146 bp, Artificial Sequence
  Bisulfite Padlock Probe
  misc_feature 92, 93, 94, 95, 96, 97: n = A,T,C or G
gactggaagagcactgtttaaaactaaaactaacaccctaaacgttggaggctcatcgttcctattcaggcagatgttatcgaggtccgacnnnnnncttataaaaaccgccgacgcccaaataaagatcggatacgcatgaggct

SEQ ID NO: 6087 - DNA, 146 bp, Artificial Sequence
  Bisulfite Padlock Probe
  misc_feature 92, 93, 94, 95, 96, 97: n = A,T,C or G
gactggaagagcactgtttaaaactaaaactaacgccctaaacgttggaggctcatcgttcctattcaggcagatgttatcgaggtccgacnnnnnncttataaaaaccgccgacgcccgaataaagatcggatacgcatgaggct

SEQ ID NO: 6088 - DNA, 146 bp, Artificial Sequence
  Bisulfite Padlock Probe
  misc_feature 94, 95, 96, 97, 98, 99: n = A,T,C or G
gactggaagagcactgtttaaaactaaatcttaaaactaaataaagttggaggctcatcgttcctattcaggcagatgttatcgaggtccgacnnnnnnataaaacctcccaaaaacaaaaacacagatcggatacgcatgaggct

SEQ ID NO: 6089 - DNA, 146 bp, Artificial Sequence
  Bisulfite Padlock Probe
  misc_feature 94, 95, 96, 97, 98, 99: n = A,T,C or G
gactggaagagcactgtttaaaactaaatcttaaaactaaataaagttggaggctcatcgttcctattcaggcagatgttatcgaggtccgacnnnnnnataaaacctcccgaaaacaaaaacacagatcggatacgcatgaggct

SEQ ID NO: 6090 - DNA, 146 bp, Artificial Sequence
  Bisulfite Padlock Probe
  misc_feature 93, 94, 95, 96, 97, 98: n = A,T,C or G
gactggaagagcactgtttaaaactctaaccccatcacccaaacgttggaggctcatcgttcctattcaggcagatgttatcgaggtccgacnnnnnnaaataaaaacctccccgaaaccccaaccgatcggatacgcatgaggct

SEQ ID NO: 6091 - DNA, 146 bp, Artificial Sequence
  Bisulfite Padlock Probe
  misc_feature 93, 94, 95, 96, 97, 98: n = A,T,C or G
gactggaagagcactgtttaaaactctaaccccatcacccgaacgttggaggctcatcgttcctattcaggcagatgttatcgaggtccgacnnnnnnaaataaaaacctccccgaaaccccgaccgatcggatacgcatgaggct

SEQ ID NO: 6092 - DNA, 146 bp, Artificial Sequence
  Bisulfite Padlock Probe
  misc_feature 93, 94, 95, 96, 97, 98: n = A,T,C or G
gactggaagagcactgtttaaaactttcaccttaaaaatttatcgttggaggctcatcgttcctattcaggcagatgttatcgaggtccgacnnnnnnctacaaactccgaaaacgcaaaactcccgatcggatacgcatgaggct

SEQ ID NO: 6093 - DNA, 146 bp, Artificial Sequence
  Bisulfite Padlock Probe
  misc_feature 93, 94, 95, 96, 97, 98: n = A,T,C or G
gactggaagagcactgtttaaaactttcgccttaaaaatttatcgttggaggctcatcgttcctattcaggcagatgttatcgaggtccgacnnnnnnctacaaactccgaaaacgcgaaactcccgatcggatacgcatgaggct

SEQ ID NO: 6094 - DNA, 146 bp, Artificial Sequence
  Bisulfite Padlock Probe
  misc_feature 94, 95, 96, 97, 98, 99: n = A,T,C or G
gactggaagagcactgtttaaaataaaacaccataaaaaccaaacgttggaggctcatcgttcctattcaggcagatgttatcgaggtccgacnnnnnnactaccaaacccctcaccctactacttgatcggatacgcatgaggct

SEQ ID NO: 6095 - DNA, 146 bp, Artificial Sequence
  Bisulfite Padlock Probe
  misc_feature 94, 95, 96, 97, 98, 99: n = A,T,C or G
gactggaagagcactgtttaaaataaaacgccataaaaaccaaacgttggaggctcatcgttcctattcaggcagatgttatcgaggtccgacnnnnnnactaccaaacccctcgccctactacttgatcggatacgcatgaggct

SEQ ID NO: 6096 - DNA, 146 bp, Artificial Sequence
  Bisulfite Padlock Probe
  misc_feature 93, 94, 95, 96, 97, 98: n = A,T,C or G
gactggaagagcactgtttaaaataaaactacacatatttctttgttggaggctcatcgttcctattcaggcagatgttatcgaggtccgacnnnnnnctactatactaccctaaatactattatcgatcggatacgcatgaggct

SEQ ID NO: 6097 - DNA, 146 bp, Artificial Sequence
  Bisulfite Padlock Probe
  misc_feature 93, 94, 95, 96, 97, 98: n = A,T,C or G
gactggaagagcactgtttaaaataaaactacacgtatttctttgttggaggctcatcgttcctattcaggcagatgttatcgaggtccgacnnnnnnctactatactaccctaaatactattatcgatcggatacgcatgaggct

SEQ ID NO: 6098 - DNA, 146 bp, Artificial Sequence
  Bisulfite Padlock Probe
  misc_feature 93, 94, 95, 96, 97, 98: n = A,T,C or G
gactggaagagcactgtttaaaataactaaacctaataaaacaagttggaggctcatcgttcctattcaggcagatgttatcgaggtccgacnnnnnntcaccctcctaactacaaaacaaaaaccgatcggatacgcatgaggct

SEQ ID NO: 6099 - DNA, 146 bp, Artificial Sequence
  Bisulfite Padlock Probe
  misc_feature 93, 94, 95, 96, 97, 98: n = A,T,C or G
gactggaagagcactgtttaaaataactaaacctaataaaacaagttggaggctcatcgttcctattcaggcagatgttatcgaggtccgacnnnnnntcaccctcctaactacgaaacaaaaaccgatcggatacgcatgaggct

SEQ ID NO: 6100 - DNA, 146 bp, Artificial Sequence
  Bisulfite Padlock Probe
  misc_feature 94, 95, 96, 97, 98, 99: n = A,T,C or G
gactggaagagcactgtttaaaatccctcaaatctcccctcaaaagttggaggctcatcgttcctattcaggcagatgttatcgaggtccgacnnnnnnataaaaactaatataaaaataacacccgatcggatacgcatgaggct

SEQ ID NO: 6101 - DNA, 146 bp, Artificial Sequence
  Bisulfite Padlock Probe
  misc_feature 94, 95, 96, 97, 98, 99: n = A,T,C or G
gactggaagagcactgtttaaaatccctcaaatctcccctcaaaagttggaggctcatcgttcctattcaggcagatgttatcgaggtccgacnnnnnnataaaaactaatataaaaataacgcccgatcggatacgcatgaggct

SEQ ID NO: 6102 - DNA, 146 bp, Artificial Sequence
  Bisulfite Padlock Probe
  misc_feature 94, 95, 96, 97, 98, 99: n = A,T,C or G
gactggaagagcactgtttaaaattcctacgcaaacaacctaaaagttggaggctcatcgttcctattcaggcagatgttatcgaggtccgacnnnnnnaaaaacgacttcgaaaaaccgaacaacgatcggatacgcatgaggct

SEQ ID NO: 6103 - DNA, 146 bp, Artificial Sequence
  Bisulfite Padlock Probe
  misc_feature 94, 95, 96, 97, 98, 99: n = A,T,C or G
gactggaagagcactgtttaaaattcctacgcgaacaacctaaaagttggaggctcatcgttcctattcaggcagatgttatcgaggtccgacnnnnnnaaaaacgacttcgaaaaaccgaacgacgatcggatacgcatgaggct

SEQ ID NO: 6104 - DNA, 146 bp, Artificial Sequence
  Bisulfite Padlock Probe
  misc_feature 92, 93, 94, 95, 96, 97: n = A,T,C or G
gactggaagagcactgtttaaacaataaattaaaaataaaaacgttggaggctcatcgttcctattcaggcagatgttatcgaggtccgacnnnnnnttaaaaactaataattaacctaaataattgatcggatacgcatgaggct

SEQ ID NO: 6105 - DNA, 146 bp, Artificial Sequence
  Bisulfite Padlock Probe
  misc_feature 93, 94, 95, 96, 97, 98: n = A,T,C or G
gactggaagagcactgtttaaacacctaaatcttaaaactctaagttggaggctcatcgttcctattcaggcagatgttatcgaggtccgacnnnnnnaacattaatatatatatacctaaatatcgatcggatacgcatgaggct

SEQ ID NO: 6106 - DNA, 146 bp, Artificial Sequence
  Bisulfite Padlock Probe
  misc_feature 96, 97, 98, 99, 100, 101: n = A,T,C or G
gactggaagagcactgtttaaaccaaaaacaaaaacctaaacataacgttggaggctcatcgttcctattcaggcagatgttatcgaggtccgacnnnnnncccgaaccgcaaaacctccaaaaaagatcggatacgcatgaggct

SEQ ID NO: 6107 - DNA, 146 bp, Artificial Sequence
  Bisulfite Padlock Probe
  misc_feature 96, 97, 98, 99, 100, 101: n = A,T,C or G
gactggaagagcactgtttaaaccaaaaacaaaaacctaaacataacgttggaggctcatcgttcctattcaggcagatgttatcgaggtccgacnnnnnncccgaaccgcaaaacctccgaaaaagatcggatacgcatgaggct

SEQ ID NO: 6108 - DNA, 146 bp, Artificial Sequence
  Bisulfite Padlock Probe
  misc_feature 92, 93, 94, 95, 96, 97: n = A,T,C or G
gactggaagagcactgtttaaaccaaacaaacccctaaactccgttggaggctcatcgttcctattcaggcagatgttatcgaggtccgacnnnnnnaaaatactacatcccctcctaacacccccgatcggatacgcatgaggct

SEQ ID NO: 6109 - DNA, 146 bp, Artificial Sequence
  Bisulfite Padlock Probe
  misc_feature 96, 97, 98, 99, 100, 101: n = A,T,C or G
gactggaagagcactgtttaaaccaaacgacgccttcaaaactactagttggaggctcatcgttcctattcaggcagatgttatcgaggtccgacnnnnnnaatcgaaaccgaaaccgaatccaaagatcggatacgcatgaggct

SEQ ID NO: 6110 - DNA, 146 bp, Artificial Sequence
  Bisulfite Padlock Probe
  misc_feature 96, 97, 98, 99, 100, 101: n = A,T,C or G
gactggaagagcactgtttaaaccaaacgacgccttcgaaactactagttggaggctcatcgttcctattcaggcagatgttatcgaggtccgacnnnnnnaatcgaaaccgaaaccgaatccgaagatcggatacgcatgaggct

SEQ ID NO: 6111 - DNA, 146 bp, Artificial Sequence
  Bisulfite Padlock Probe
  misc_feature 95, 96, 97, 98, 99, 100: n = A,T,C or G
gactggaagagcactgtttaaaccctaaataaaaccaaaaataaaagttggaggctcatcgttcctattcaggcagatgttatcgaggtccgacnnnnnncctaactcccaaaaaatctaaaactcgatcggatacgcatgaggct

SEQ ID NO: 6112 - DNA, 146 bp, Artificial Sequence
  Bisulfite Padlock Probe
  misc_feature 95, 96, 97, 98, 99, 100: n = A,T,C or G
gactggaagagcactgtttaaaccctaaataaaaccaaaaataaaagttggaggctcatcgttcctattcaggcagatgttatcgaggtccgacnnnnnncctaactcccgaaaaatctaaaactcgatcggatacgcatgaggct

SEQ ID NO: 6113 - DNA, 146 bp, Artificial Sequence
  Bisulfite Padlock Probe
  misc_feature 92, 93, 94, 95, 96, 97: n = A,T,C or G
gactggaagagcactgtttaaaccgaacaaacccctaaactccgttggaggctcatcgttcctattcaggcagatgttatcgaggtccgacnnnnnnaaaatactacgtcccctcctaacacccccgatcggatacgcatgaggct

SEQ ID NO: 6114 - DNA, 146 bp, Artificial Sequence
  Bisulfite Padlock Probe
  misc_feature 92, 93, 94, 95, 96, 97: n = A,T,C or G
gactggaagagcactgtttaaaccgccaaccaaaaccaaaaaagttggaggctcatcgttcctattcaggcagatgttatcgaggtccgacnnnnnnaattttcccctttctctctaaactaactcgatcggatacgcatgaggct

SEQ ID NO: 6115 - DNA, 146 bp, Artificial Sequence
  Bisulfite Padlock Probe
  misc_feature 92, 93, 94, 95, 96, 97: n = A,T,C or G
gactggaagagcactgtttaaaccgccaaccaaaaccgaaaaagttggaggctcatcgttcctattcaggcagatgttatcgaggtccgacnnnnnnaattttcccctttctctctaaactaactcgatcggatacgcatgaggct

SEQ ID NO: 6116 - DNA, 146 bp, Artificial Sequence
  Bisulfite Padlock Probe
  misc_feature 92, 93, 94, 95, 96, 97: n = A,T,C or G
gactggaagagcactgtttaaacctaaactcccaaaaatctccgttggaggctcatcgttcctattcaggcagatgttatcgaggtccgacnnnnnnactcttaattacctccctaacctccccacgatcggatacgcatgaggct

SEQ ID NO: 6117 - DNA, 146 bp, Artificial Sequence
  Bisulfite Padlock Probe
  misc_feature 94, 95, 96, 97, 98, 99: n = A,T,C or G
gactggaagagcactgtttaaacctttaattaaactataaatcaagttggaggctcatcgttcctattcaggcagatgttatcgaggtccgacnnnnnnactattaaataatatacccaaaatttcgatcggatacgcatgaggct

SEQ ID NO: 6118 - DNA, 146 bp, Artificial Sequence
  Bisulfite Padlock Probe
  misc_feature 94, 95, 96, 97, 98, 99: n = A,T,C or G
gactggaagagcactgtttaaacctttaattaaactataaatcaagttggaggctcatcgttcctattcaggcagatgttatcgaggtccgacnnnnnnactattaaataatatacccgaaatttcgatcggatacgcatgaggct

SEQ ID NO: 6119 - DNA, 146 bp, Artificial Sequence
  Bisulfite Padlock Probe
  misc_feature 96, 97, 98, 99, 100, 101: n = A,T,C or G
gactggaagagcactgtttaaacgaaccaaatctaaaaccccactccgttggaggctcatcgttcctattcaggcagatgttatcgaggtccgacnnnnnnccaacctaaaccatacgccccaacagatcggatacgcatgaggct

SEQ ID NO: 6120 - DNA, 146 bp, Artificial Sequence
  Bisulfite Padlock Probe
  misc_feature 96, 97, 98, 99, 100, 101: n = A,T,C or G
gactggaagagcactgtttaaacgaaccaaatctaaaaccccgctccgttggaggctcatcgttcctattcaggcagatgttatcgaggtccgacnnnnnnccaacctaaaccatacgccccaacggatcggatacgcatgaggct

SEQ ID NO: 6121 - DNA, 146 bp, Artificial Sequence
  Bisulfite Padlock Probe
  misc_feature 96, 97, 98, 99, 100, 101: n = A,T,C or G
gactggaagagcactgtttaaacgacaactaataacaacacaaaaacgttggaggctcatcgttcctattcaggcagatgttatcgaggtccgacnnnnnnccgtatcccgctctacacccttctagatcggatacgcatgaggct

SEQ ID NO: 6122 - DNA, 146 bp, Artificial Sequence
  Bisulfite Padlock Probe
  misc_feature 96, 97, 98, 99, 100, 101: n = A,T,C or G
gactggaagagcactgtttaaacgacaactaataacaacgcaaaaacgttggaggctcatcgttcctattcaggcagatgttatcgaggtccgacnnnnnnccgtatcccgctctacgcccttctagatcggatacgcatgaggct

SEQ ID NO: 6123 - DNA, 146 bp, Artificial Sequence
  Bisulfite Padlock Probe
  misc_feature 92, 93, 94, 95, 96, 97: n = A,T,C or G
gactggaagagcactgtttaaacgataaattaaaaataaaaacgttggaggctcatcgttcctattcaggcagatgttatcgaggtccgacnnnnnnttaaaaactaataattaacctaaataattgatcggatacgcatgaggct

SEQ ID NO: 6124 - DNA, 146 bp, Artificial Sequence
  Bisulfite Padlock Probe
  misc_feature 93, 94, 95, 96, 97, 98: n = A,T,C or G
gactggaagagcactgtttaaacgcctaaatcttaaaactctaagttggaggctcatcgttcctattcaggcagatgttatcgaggtccgacnnnnnnaacattaatatatatatacctaaatatcgatcggatacgcatgaggct

SEQ ID NO: 6125 - DNA, 146 bp, Artificial Sequence
  Bisulfite Padlock Probe
  misc_feature 96, 97, 98, 99, 100, 101: n = A,T,C or G
gactggaagagcactgtttaaacgcgacgtccacaaaaacataaaaagttggaggctcatcgttcctattcaggcagatgttatcgaggtccgacnnnnnnaaaataacctcctccaaaccaccttgatcggatacgcatgaggct

SEQ ID NO: 6126 - DNA, 146 bp, Artificial Sequence
  Bisulfite Padlock Probe
  misc_feature 96, 97, 98, 99, 100, 101: n = A,T,C or G
gactggaagagcactgtttaaacgcgacgtccgcaaaaacataaaaagttggaggctcatcgttcctattcaggcagatgttatcgaggtccgacnnnnnnaaaataacctcctccaaaccgccttgatcggatacgcatgaggct

SEQ ID NO: 6127 - DNA, 146 bp, Artificial Sequence
  Bisulfite Padlock Probe
  misc_feature 92, 93, 94, 95, 96, 97: n = A,T,C or G
gactggaagagcactgtttaaacgcgcgacacaccaaacaaacgttggaggctcatcgttcctattcaggcagatgttatcgaggtccgacnnnnnncaaacgcaaaaacgacgaaaacgacaaaagatcggatacgcatgaggct

SEQ ID NO: 6128 - DNA, 146 bp, Artificial Sequence
  Bisulfite Padlock Probe
  misc_feature 92, 93, 94, 95, 96, 97: n = A,T,C or G
gactggaagagcactgtttaaacgcgcgacacaccgaacaaacgttggaggctcatcgttcctattcaggcagatgttatcgaggtccgacnnnnnncaaacgcaaaaacgacgaaaacgacgaaagatcggatacgcatgaggct

SEQ ID NO: 6129 - DNA, 146 bp, Artificial Sequence
  Bisulfite Padlock Probe
  misc_feature 96, 97, 98, 99, 100, 101: n = A,T,C or G
gactggaagagcactgtttaaacgctaaacgcgcaaacctttaaaaagttggaggctcatcgttcctattcaggcagatgttatcgaggtccgacnnnnnnaaaaacgaactaaccgaccaccaccgatcggatacgcatgaggct

SEQ ID NO: 6130 - DNA, 146 bp, Artificial Sequence
  Bisulfite Padlock Probe
  misc_feature 96, 97, 98, 99, 100, 101: n = A,T,C or G
gactggaagagcactgtttaaacgctaaacgcgcgaacctttaaaaagttggaggctcatcgttcctattcaggcagatgttatcgaggtccgacnnnnnnaaaaacgaactaaccgaccgccaccgatcggatacgcatgaggct

SEQ ID NO: 6131 - DNA, 146 bp, Artificial Sequence
  Bisulfite Padlock Probe
  misc_feature 92, 93, 94, 95, 96, 97: n = A,T,C or G
gactggaagagcactgtttaaactacgcatccatttccaaaaagttggaggctcatcgttcctattcaggcagatgttatcgaggtccgacnnnnnnaaccctctccaaaaatatccaaaaactacgatcggatacgcatgaggct

SEQ ID NO: 6132 - DNA, 146 bp, Artificial Sequence
  Bisulfite Padlock Probe
  misc_feature 92, 93, 94, 95, 96, 97: n = A,T,C or G
gactggaagagcactgtttaaactacgcgtccatttccaaaaagttggaggctcatcgttcctattcaggcagatgttatcgaggtccgacnnnnnngaccctctccaaaaatatccaaaaactacgatcggatacgcatgaggct

SEQ ID NO: 6133 - DNA, 146 bp, Artificial Sequence
  Bisulfite Padlock Probe
  misc_feature 94, 95, 96, 97, 98, 99: n = A,T,C or G
gactggaagagcactgtttaaactatatcaccacctacaaactacgttggaggctcatcgttcctattcaggcagatgttatcgaggtccgacnnnnnnaaaaaccgcacacctctcctaactctagatcggatacgcatgaggct

SEQ ID NO: 6134 - DNA, 146 bp, Artificial Sequence
  Bisulfite Padlock Probe
  misc_feature 94, 95, 96, 97, 98, 99: n = A,T,C or G
gactggaagagcactgtttaaactatatcaccgcctacaaactacgttggaggctcatcgttcctattcaggcagatgttatcgaggtccgacnnnnnnaaaaaccgcgcacctctcctaactctagatcggatacgcatgaggct

SEQ ID NO: 6135 - DNA, 146 bp, Artificial Sequence
  Bisulfite Padlock Probe
  misc_feature 93, 94, 95, 96, 97, 98: n = A,T,C or G
gactggaagagcactgtttaaacttatacttcttcaacaactacgttggaggctcatcgttcctattcaggcagatgttatcgaggtccgacnnnnnnaaaaatccccgcaaacaaaaccaaatccgatcggatacgcatgaggct

SEQ ID NO: 6136 - DNA, 146 bp, Artificial Sequence
  Bisulfite Padlock Probe
  misc_feature 93, 94, 95, 96, 97, 98: n = A,T,C or G
gactggaagagcactgtttaaacttatacttcttcaacaactacgttggaggctcatcgttcctattcaggcagatgttatcgaggtccgacnnnnnnaaaaatccccgcaaacaaaaccgaatccgatcggatacgcatgaggct

SEQ ID NO: 6137 - DNA, 146 bp, Artificial Sequence
  Bisulfite Padlock Probe
  misc_feature 93, 94, 95, 96, 97, 98: n = A,T,C or G
gactggaagagcactgtttaaacttcacctaacaaacttaaaaagttggaggctcatcgttcctattcaggcagatgttatcgaggtccgacnnnnnncttcgctcttacacgccaacttaccatcgatcggatacgcatgaggct

SEQ ID NO: 6138 - DNA, 146 bp, Artificial Sequence
  Bisulfite Padlock Probe
  misc_feature 92, 93, 94, 95, 96, 97: n = A,T,C or G
gactggaagagcactgtttaaacttcgccgtctacgcctacacgttggaggctcatcgttcctattcaggcagatgttatcgaggtccgacnnnnnnctcaaaaacaacccaaatactcctataacgatcggatacgcatgaggct

SEQ ID NO: 6139 - DNA, 146 bp, Artificial Sequence
  Bisulfite Padlock Probe
  misc_feature 92, 93, 94, 95, 96, 97: n = A,T,C or G
gactggaagagcactgtttaaacttcgccgtctacgcctacgcgttggaggctcatcgttcctattcaggcagatgttatcgaggtccgacnnnnnnctcaaaaacgacccaaatactcctataacgatcggatacgcatgaggct

SEQ ID NO: 6140 - DNA, 146 bp, Artificial Sequence
  Bisulfite Padlock Probe
  misc_feature 93, 94, 95, 96, 97, 98: n = A,T,C or G
gactggaagagcactgtttaaacttcgcctaacaaacttaaaaagttggaggctcatcgttcctattcaggcagatgttatcgaggtccgacnnnnnncttcgctcttacacgccgacttaccatcgatcggatacgcatgaggct

SEQ ID NO: 6141 - DNA, 146 bp, Artificial Sequence
  Bisulfite Padlock Probe
  misc_feature 94, 95, 96, 97, 98, 99: n = A,T,C or G
gactggaagagcactgtttaaataaacgctacgcaactaactaacgttggaggctcatcgttcctattcaggcagatgttatcgaggtccgacnnnnnnccgctaaactaacgcctcccaaactacgatcggatacgcatgaggct

SEQ ID NO: 6142 - DNA, 146 bp, Artificial Sequence
  Bisulfite Padlock Probe
  misc_feature 94, 95, 96, 97, 98, 99: n = A,T,C or G
gactggaagagcactgtttaaataaacgctacgcgactaactaacgttggaggctcatcgttcctattcaggcagatgttatcgaggtccgacnnnnnnccgctaaactaacgcctcccgaactacgatcggatacgcatgaggct

SEQ ID NO: 6143 - DNA, 146 bp, Artificial Sequence
  Bisulfite Padlock Probe
  misc_feature 92, 93, 94, 95, 96, 97: n = A,T,C or G
gactggaagagcactgtttaaataacgtacgacaacaactaaagttggaggctcatcgttcctattcaggcagatgttatcgaggtccgacnnnnnnacacaacctccaacaccccttaactaattgatcggatacgcatgaggct

SEQ ID NO: 6144 - DNA, 146 bp, Artificial Sequence
  Bisulfite Padlock Probe
  misc_feature 92, 93, 94, 95, 96, 97: n = A,T,C or G
gactggaagagcactgtttaaataacgtacgacgacaactaaagttggaggctcatcgttcctattcaggcagatgttatcgaggtccgacnnnnnnacacaacctccaacaccccttaactaattgatcggatacgcatgaggct

SEQ ID NO: 6145 - DNA, 146 bp, Artificial Sequence
  Bisulfite Padlock Probe
  misc_feature 94, 95, 96, 97, 98, 99: n = A,T,C or G
gactggaagagcactgtttaaataactacatactaaaacccaatcgttggaggctcatcgttcctattcaggcagatgttatcgaggtccgacnnnnnnaaaactccccactaccaatacccaaccgatcggatacgcatgaggct

SEQ ID NO: 6146 - DNA, 146 bp, Artificial Sequence
  Bisulfite Padlock Probe
  misc_feature 94, 95, 96, 97, 98, 99: n = A,T,C or G
gactggaagagcactgtttaaataactacatactaaaacccaatcgttggaggctcatcgttcctattcaggcagatgttatcgaggtccgacnnnnnnaaaactccccgctaccaatacccaaccgatcggatacgcatgaggct

SEQ ID NO: 6147 - DNA, 146 bp, Artificial Sequence
  Bisulfite Padlock Probe
  misc_feature 92, 93, 94, 95, 96, 97: n = A,T,C or G
gactggaagagcactgtttaaatactcgaaaattcaaaactacgttggaggctcatcgttcctattcaggcagatgttatcgaggtccgacnnnnnnactaattctatcaaacacttctaacaatcgatcggatacgcatgaggct

SEQ ID NO: 6148 - DNA, 146 bp, Artificial Sequence
  Bisulfite Padlock Probe
  misc_feature 92, 93, 94, 95, 96, 97: n = A,T,C or G
gactggaagagcactgtttaaatactcgaaaattcgaaactacgttggaggctcatcgttcctattcaggcagatgttatcgaggtccgacnnnnnnactaattctatcaaacacttctaacaatcgatcggatacgcatgaggct

SEQ ID NO: 6149 - DNA, 146 bp, Artificial Sequence
  Bisulfite Padlock Probe
  misc_feature 92, 93, 94, 95, 96, 97: n = A,T,C or G
gactggaagagcactgtttaaatatccaacccacaacaataacgttggaggctcatcgttcctattcaggcagatgttatcgaggtccgacnnnnnnacccactactactaaaaacaacacctctcgatcggatacgcatgaggct

SEQ ID NO: 6150 - DNA, 146 bp, Artificial Sequence
  Bisulfite Padlock Probe
  misc_feature 92, 93, 94, 95, 96, 97: n = A,T,C or G
gactggaagagcactgtttaaatatccaacccgcaacaataacgttggaggctcatcgttcctattcaggcagatgttatcgaggtccgacnnnnnnacccgctactactaaaaacaacacctctcgatcggatacgcatgaggct

SEQ ID NO: 6151 - DNA, 146 bp, Artificial Sequence
  Bisulfite Padlock Probe
  misc_feature 92, 93, 94, 95, 96, 97: n = A,T,C or G
gactggaagagcactgtttaaatcaaaaacaccaacccaccccgttggaggctcatcgttcctattcaggcagatgttatcgaggtccgacnnnnnnaaactcttaataaaactaacctctcctacgatcggatacgcatgaggct

SEQ ID NO: 6152 - DNA, 146 bp, Artificial Sequence
  Bisulfite Padlock Probe
  misc_feature 92, 93, 94, 95, 96, 97: n = A,T,C or G
gactggaagagcactgtttaaatcaaaaacgccaacccaccccgttggaggctcatcgttcctattcaggcagatgttatcgaggtccgacnnnnnnaaactcttaataaaactaacctctcctacgatcggatacgcatgaggct

SEQ ID NO: 6153 - DNA, 146 bp, Artificial Sequence
  Bisulfite Padlock Probe
  misc_feature 96, 97, 98, 99, 100, 101: n = A,T,C or G
gactggaagagcactgtttaaatcaaaatattaaccatatattcaacgttggaggctcatcgttcctattcaggcagatgttatcgaggtccgacnnnnnnccctcccgactccaaactcctaactgatcggatacgcatgaggct

SEQ ID NO: 6154 - DNA, 146 bp, Artificial Sequence
  Bisulfite Padlock Probe
  misc_feature 96, 97, 98, 99, 100, 101: n = A,T,C or G
gactggaagagcactgtttaaatcaaaatattaaccatatattcaacgttggaggctcatcgttcctattcaggcagatgttatcgaggtccgacnnnnnnccctcccgactccgaactcctaactgatcggatacgcatgaggct

SEQ ID NO: 6155 - DNA, 146 bp, Artificial Sequence
  Bisulfite Padlock Probe
  misc_feature 93, 94, 95, 96, 97, 98: n = A,T,C or G
gactggaagagcactgtttaaatcaaattcaaatttatcccaaagttggaggctcatcgttcctattcaggcagatgttatcgaggtccgacnnnnnnccaaaaatcaccgacactcctccaactcgatcggatacgcatgaggct

SEQ ID NO: 6156 - DNA, 146 bp, Artificial Sequence
  Bisulfite Padlock Probe
  misc_feature 93, 94, 95, 96, 97, 98: n = A,T,C or G
gactggaagagcactgtttaaatcaaattcaaatttatcccaaagttggaggctcatcgttcctattcaggcagatgttatcgaggtccgacnnnnnnccaaaaatcaccgacactcctccgactcgatcggatacgcatgaggct

SEQ ID NO: 6157 - DNA, 146 bp, Artificial Sequence
  Bisulfite Padlock Probe
  misc_feature 94, 95, 96, 97, 98, 99: n = A,T,C or G
gactggaagagcactgtttaaatcacctactacaactccccttccgttggaggctcatcgttcctattcaggcagatgttatcgaggtccgacnnnnnnaaaaaccgaacctacgaaaaacaccccgatcggatacgcatgaggct

SEQ ID NO: 6158 - DNA, 146 bp, Artificial Sequence
  Bisulfite Padlock Probe
  misc_feature 94, 95, 96, 97, 98, 99: n = A,T,C or G
gactggaagagcactgtttaaatcacctactacaactccccttccgttggaggctcatcgttcctattcaggcagatgttatcgaggtccgacnnnnnnaaaaaccgaacctacgaaaaacgccccgatcggatacgcatgaggct

SEQ ID NO: 6159 - DNA, 146 bp, Artificial Sequence
  Bisulfite Padlock Probe
  misc_feature 92, 93, 94, 95, 96, 97: n = A,T,C or G
gactggaagagcactgtttaaatccaaaataaactacatattcgttggaggctcatcgttcctattcaggcagatgttatcgaggtccgacnnnnnncctccgcgcccacaaaataaatcaaactagatcggatacgcatgaggct

SEQ ID NO: 6160 - DNA, 146 bp, Artificial Sequence
  Bisulfite Padlock Probe
  misc_feature 92, 93, 94, 95, 96, 97: n = A,T,C or G
gactggaagagcactgtttaaatccaaacttaacatttacatagttggaggctcatcgttcctattcaggcagatgttatcgaggtccgacnnnnnncaaacaccttaatcctttattcctcactagatcggatacgcatgaggct

SEQ ID NO: 6161 - DNA, 146 bp, Artificial Sequence
  Bisulfite Padlock Probe
  misc_feature 92, 93, 94, 95, 96, 97: n = A,T,C or G
gactggaagagcactgtttaaatccaaacttaacgtttacatagttggaggctcatcgttcctattcaggcagatgttatcgaggtccgacnnnnnncaaacaccttaatcctttattcctcactagatcggatacgcatgaggct

SEQ ID NO: 6162 - DNA, 146 bp, Artificial Sequence
  Bisulfite Padlock Probe
  misc_feature 94, 95, 96, 97, 98, 99: n = A,T,C or G
gactggaagagcactgtttaaatccacatatttttatttcataacgttggaggctcatcgttcctattcaggcagatgttatcgaggtccgacnnnnnngactctccgatcccaactctctccaaagatcggatacgcatgaggct

SEQ ID NO: 6163 - DNA, 146 bp, Artificial Sequence
  Bisulfite Padlock Probe
  misc_feature 94, 95, 96, 97, 98, 99: n = A,T,C or G
gactggaagagcactgtttaaatccacatatttttatttcgtaacgttggaggctcatcgttcctattcaggcagatgttatcgaggtccgacnnnnnngactctccgatcccgactctctccaaagatcggatacgcatgaggct

SEQ ID NO: 6164 - DNA, 146 bp, Artificial Sequence
  Bisulfite Padlock Probe
  misc_feature 94, 95, 96, 97, 98, 99: n = A,T,C or G
gactggaagagcactgtttaaatcccaaatccttccaacctcaccgttggaggctcatcgttcctattcaggcagatgttatcgaggtccgacnnnnnntaaccttacccgaacaaccacaaattcgatcggatacgcatgaggct

SEQ ID NO: 6165 - DNA, 146 bp, Artificial Sequence
  Bisulfite Padlock Probe
  misc_feature 94, 95, 96, 97, 98, 99: n = A,T,C or G
gactggaagagcactgtttaaatcccaaatccttccaacctcgccgttggaggctcatcgttcctattcaggcagatgttatcgaggtccgacnnnnnntaaccttacccgaacaaccgcaaattcgatcggatacgcatgaggct

SEQ ID NO: 6166 - DNA, 146 bp, Artificial Sequence
  Bisulfite Padlock Probe
  misc_feature 96, 97, 98, 99, 100, 101: n = A,T,C or G
gactggaagagcactgtttaaatcccctcaaatcacctcctattaacgttggaggctcatcgttcctattcaggcagatgttatcgaggtccgacnnnnnncctcgaccgacacaactcaaactccgatcggatacgcatgaggct

SEQ ID NO: 6167 - DNA, 146 bp, Artificial Sequence
  Bisulfite Padlock Probe
  misc_feature 96, 97, 98, 99, 100, 101: n = A,T,C or G
gactggaagagcactgtttaaatcccctcaaatcgcctcctattaacgttggaggctcatcgttcctattcaggcagatgttatcgaggtccgacnnnnnncctcgaccgacacgactcaaactccgatcggatacgcatgaggct

SEQ ID NO: 6168 - DNA, 146 bp, Artificial Sequence
  Bisulfite Padlock Probe
  misc_feature 92, 93, 94, 95, 96, 97: n = A,T,C or G
gactggaagagcactgtttaaatccgaaataaactacatattcgttggaggctcatcgttcctattcaggcagatgttatcgaggtccgacnnnnnncctccgcgcccacgaaataaatcaaactagatcggatacgcatgaggct

SEQ ID NO: 6169 - DNA, 146 bp, Artificial Sequence
  Bisulfite Padlock Probe
  misc_feature 92, 93, 94, 95, 96, 97: n = A,T,C or G
gactggaagagcactgtttaaatccgaacacaactccctataagttggaggctcatcgttcctattcaggcagatgttatcgaggtccgacnnnnnnctacttttccccgtccaaataactctacagatcggatacgcatgaggct

SEQ ID NO: 6170 - DNA, 146 bp, Artificial Sequence
  Bisulfite Padlock Probe
  misc_feature 92, 93, 94, 95, 96, 97: n = A,T,C or G
gactggaagagcactgtttaaatccgaacgcaactccctataagttggaggctcatcgttcctattcaggcagatgttatcgaggtccgacnnnnnnctacttttccccgtccgaataactctacagatcggatacgcatgaggct

SEQ ID NO: 6171 - DNA, 146 bp, Artificial Sequence
  Bisulfite Padlock Probe
  misc_feature 96, 97, 98, 99, 100, 101: n = A,T,C or G
gactggaagagcactgtttaaattaaacaacaaacaaattaaaaacagttggaggctcatcgttcctattcaggcagatgttatcgaggtccgacnnnnnnaaaacgctccacatactactaatacgatcggatacgcatgaggct

SEQ ID NO: 6172 - DNA, 146 bp, Artificial Sequence
  Bisulfite Padlock Probe
  misc_feature 96, 97, 98, 99, 100, 101: n = A,T,C or G
gactggaagagcactgtttaaattaaacgacaaacaaattaaaaacagttggaggctcatcgttcctattcaggcagatgttatcgaggtccgacnnnnnnaaaacgctccacgtactactaatacgatcggatacgcatgaggct

SEQ ID NO: 6173 - DNA, 146 bp, Artificial Sequence
  Bisulfite Padlock Probe
  misc_feature 93, 94, 95, 96, 97, 98: n = A,T,C or G
gactggaagagcactgtttaaattaattatccttacaattaaaagttggaggctcatcgttcctattcaggcagatgttatcgaggtccgacnnnnnnatttaaaaactataaatattctccaaaagatcggatacgcatgaggct

SEQ ID NO: 6174 - DNA, 146 bp, Artificial Sequence
  Bisulfite Padlock Probe
  misc_feature 93, 94, 95, 96, 97, 98: n = A,T,C or G
gactggaagagcactgtttaaattcataaactcccacacacttcgttggaggctcatcgttcctattcaggcagatgttatcgaggtccgacnnnnnntacgctcgctcccactactaatactaccgatcggatacgcatgaggct

SEQ ID NO: 6175 - DNA, 146 bp, Artificial Sequence
  Bisulfite Padlock Probe
  misc_feature 95, 96, 97, 98, 99, 100: n = A,T,C or G
gactggaagagcactgtttaaattcccacccaccccataaccatccgttggaggctcatcgttcctattcaggcagatgttatcgaggtccgacnnnnnnaatcgcaacctccccaactaataatcgatcggatacgcatgaggct

SEQ ID NO: 6176 - DNA, 146 bp, Artificial Sequence
  Bisulfite Padlock Probe
  misc_feature 95, 96, 97, 98, 99, 100: n = A,T,C or G
gactggaagagcactgtttaaattcccacccaccccataaccatccgttggaggctcatcgttcctattcaggcagatgttatcgaggtccgacnnnnnnaatcgcgacctccccaactaataatcgatcggatacgcatgaggct

SEQ ID NO: 6177 - DNA, 146 bp, Artificial Sequence
  Bisulfite Padlock Probe
  misc_feature 93, 94, 95, 96, 97, 98: n = A,T,C or G
gactggaagagcactgtttaaattcgtaaactcccacacacttcgttggaggctcatcgttcctattcaggcagatgttatcgaggtccgacnnnnnntacgctcgctcccgctactaatactaccgatcggatacgcatgaggct

SEQ ID NO: 6178 - DNA, 146 bp, Artificial Sequence
  Bisulfite Padlock Probe
  misc_feature 92, 93, 94, 95, 96, 97: n = A,T,C or G
gactggaagagcactgtttaaatttaactatcacatttaacacgttggaggctcatcgttcctattcaggcagatgttatcgaggtccgacnnnnnnccactaactaaaactccctctccctttaagatcggatacgcatgaggct

SEQ ID NO: 6179 - DNA, 146 bp, Artificial Sequence
  Bisulfite Padlock Probe
  misc_feature 92, 93, 94, 95, 96, 97: n = A,T,C or G
gactggaagagcactgtttaaatttaactatcgcatttaacacgttggaggctcatcgttcctattcaggcagatgttatcgaggtccgacnnnnnnccactaactaaaactccctctccctttaagatcggatacgcatgaggct

SEQ ID NO: 6180 - DNA, 146 bp, Artificial Sequence
  Bisulfite Padlock Probe
  misc_feature 96, 97, 98, 99, 100, 101: n = A,T,C or G
gactggaagagcactgtttaaatttctacaataccgaacacccacccgttggaggctcatcgttcctattcaggcagatgttatcgaggtccgacnnnnnnccctaaaccacgtcgaaacaatctcgatcggatacgcatgaggct

SEQ ID NO: 6181 - DNA, 146 bp, Artificial Sequence
  Bisulfite Padlock Probe
  misc_feature 96, 97, 98, 99, 100, 101: n = A,T,C or G
gactggaagagcactgtttaaatttctacaataccgaacgcccacccgttggaggctcatcgttcctattcaggcagatgttatcgaggtccgacnnnnnnccctaaaccacgtcgaaacgatctcgatcggatacgcatgaggct

SEQ ID NO: 6182 - DNA, 146 bp, Artificial Sequence
  Bisulfite Padlock Probe
  misc_feature 92, 93, 94, 95, 96, 97: n = A,T,C or G
gactggaagagcactgtttaacaactacccttaataaataaatgttggaggctcatcgttcctattcaggcagatgttatcgaggtccgacnnnnnncaacaacaacaaaaacaacaaaaacaacagatcggatacgcatgaggct

SEQ ID NO: 6183 - DNA, 146 bp, Artificial Sequence
  Bisulfite Padlock Probe
  misc_feature 93, 94, 95, 96, 97, 98: n = A,T,C or G
gactggaagagcactgtttaacaccaaaacccaacaaacaaaaagttggaggctcatcgttcctattcaggcagatgttatcgaggtccgacnnnnnnaaaaaccacaccctacattccaaaaaccgatcggatacgcatgaggct

SEQ ID NO: 6184 - DNA, 146 bp, Artificial Sequence
  Bisulfite Padlock Probe
  misc_feature 93, 94, 95, 96, 97, 98: n = A,T,C or G
gactggaagagcactgtttaacaccaaaacccgacaaacaaaaagttggaggctcatcgttcctattcaggcagatgttatcgaggtccgacnnnnnnaaaaaccacaccctacattccaaaaaccgatcggatacgcatgaggct

SEQ ID NO: 6185 - DNA, 146 bp, Artificial Sequence
  Bisulfite Padlock Probe
  misc_feature 92, 93, 94, 95, 96, 97: n = A,T,C or G
gactggaagagcactgtttaacactactacaactacgtcacccgttggaggctcatcgttcctattcaggcagatgttatcgaggtccgacnnnnnnatactaaaaataatcccccactcctatccgatcggatacgcatgaggct

SEQ ID NO: 6186 - DNA, 146 bp, Artificial Sequence
  Bisulfite Padlock Probe
  misc_feature 92, 93, 94, 95, 96, 97: n = A,T,C or G
gactggaagagcactgtttaacactactacaactacgtcgcccgttggaggctcatcgttcctattcaggcagatgttatcgaggtccgacnnnnnnatactaaaaataatcccccgctcctatccgatcggatacgcatgaggct

SEQ ID NO: 6187 - DNA, 146 bp, Artificial Sequence
  Bisulfite Padlock Probe
  misc_feature 92, 93, 94, 95, 96, 97: n = A,T,C or G
gactggaagagcactgtttaacactactcgaatacctccaaccgttggaggctcatcgttcctattcaggcagatgttatcgaggtccgacnnnnnnaaaaatttatataacaccactcaacaaaagatcggatacgcatgaggct

SEQ ID NO: 6188 - DNA, 146 bp, Artificial Sequence
  Bisulfite Padlock Probe
  misc_feature 92, 93, 94, 95, 96, 97: n = A,T,C or G
gactggaagagcactgtttaacactactcgaatacctccgaccgttggaggctcatcgttcctattcaggcagatgttatcgaggtccgacnnnnnnaaaaatttatataacaccgctcaacaaaagatcggatacgcatgaggct

SEQ ID NO: 6189 - DNA, 146 bp, Artificial Sequence
  Bisulfite Padlock Probe
  misc_feature 95, 96, 97, 98, 99, 100: n = A,T,C or G
gactggaagagcactgtttaacattattttcctcttaactacaaacgttggaggctcatcgttcctattcaggcagatgttatcgaggtccgacnnnnnnaaaaacgcgtctacgaaaaatacaccgatcggatacgcatgaggct

SEQ ID NO: 6190 - DNA, 146 bp, Artificial Sequence
  Bisulfite Padlock Probe
  misc_feature 92, 93, 94, 95, 96, 97: n = A,T,C or G
gactggaagagcactgtttaaccaaataaaacacccaccccacgttggaggctcatcgttcctattcaggcagatgttatcgaggtccgacnnnnnnatacacaccaaaacgaacaacgacaaaccgatcggatacgcatgaggct

SEQ ID NO: 6191 - DNA, 146 bp, Artificial Sequence
  Bisulfite Padlock Probe
  misc_feature 92, 93, 94, 95, 96, 97: n = A,T,C or G
gactggaagagcactgtttaaccaaataaaacacccaccccacgttggaggctcatcgttcctattcaggcagatgttatcgaggtccgacnnnnnnatacacaccaaaacgaacaacgacgaaccgatcggatacgcatgaggct

SEQ ID NO: 6192 - DNA, 146 bp, Artificial Sequence
  Bisulfite Padlock Probe
  misc_feature 92, 93, 94, 95, 96, 97: n = A,T,C or G
gactggaagagcactgtttaacccaaacgacgaaaacaaaaccgttggaggctcatcgttcctattcaggcagatgttatcgaggtccgacnnnnnntcttccctctcctctacctctacatactagatcggatacgcatgaggct

SEQ ID NO: 6193 - DNA, 146 bp, Artificial Sequence
  Bisulfite Padlock Probe
  misc_feature 92, 93, 94, 95, 96, 97: n = A,T,C or G
gactggaagagcactgtttaacccaaacgacgaaaacgaaaccgttggaggctcatcgttcctattcaggcagatgttatcgaggtccgacnnnnnntcttccctctcctctacctctacatactagatcggatacgcatgaggct

SEQ ID NO: 6194 - DNA, 146 bp, Artificial Sequence
  Bisulfite Padlock Probe
  misc_feature 92, 93, 94, 95, 96, 97: n = A,T,C or G
gactggaagagcactgtttaacccgccaataaaaaccaaaaaagttggaggctcatcgttcctattcaggcagatgttatcgaggtccgacnnnnnnactactataattatcaacaccacttctccgatcggatacgcatgaggct

SEQ ID NO: 6195 - DNA, 146 bp, Artificial Sequence
  Bisulfite Padlock Probe
  misc_feature 92, 93, 94, 95, 96, 97: n = A,T,C or G
gactggaagagcactgtttaacccgccaataaaaaccgaaaaagttggaggctcatcgttcctattcaggcagatgttatcgaggtccgacnnnnnnactactataattatcaacaccacttctccgatcggatacgcatgaggct

SEQ ID NO: 6196 - DNA, 146 bp, Artificial Sequence
  Bisulfite Padlock Probe
  misc_feature 94, 95, 96, 97, 98, 99: n = A,T,C or G
gactggaagagcactgtttaaccctctacacaataaaaataaaacgttggaggctcatcgttcctattcaggcagatgttatcgaggtccgacnnnnnnaaaattcccctcatttcctccaacaccgatcggatacgcatgaggct

SEQ ID NO: 6197 - DNA, 146 bp, Artificial Sequence
  Bisulfite Padlock Probe
  misc_feature 94, 95, 96, 97, 98, 99: n = A,T,C or G
gactggaagagcactgtttaaccctctacacaataaaaataaaacgttggaggctcatcgttcctattcaggcagatgttatcgaggtccgacnnnnnnaaaattcccctcgtttcctccaacaccgatcggatacgcatgaggct

SEQ ID NO: 6198 - DNA, 146 bp, Artificial Sequence
  Bisulfite Padlock Probe
  misc_feature 92, 93, 94, 95, 96, 97: n = A,T,C or G
gactggaagagcactgtttaaccgaaaacgaaacgaaacaaccgttggaggctcatcgttcctattcaggcagatgttatcgaggtccgacnnnnnnttttaatacttccaattatattaaacaacgatcggatacgcatgaggct

SEQ ID NO: 6199 - DNA, 146 bp, Artificial Sequence
  Bisulfite Padlock Probe
  misc_feature 92, 93, 94, 95, 96, 97: n = A,T,C or G
gactggaagagcactgtttaaccgaaaacgaaacgaaacgaccgttggaggctcatcgttcctattcaggcagatgttatcgaggtccgacnnnnnnttttaatacttccaattatattaaacaacgatcggatacgcatgaggct

SEQ ID NO: 6200 - DNA, 146 bp, Artificial Sequence
  Bisulfite Padlock Probe
  misc_feature 92, 93, 94, 95, 96, 97: n = A,T,C or G
gactggaagagcactgtttaaccgcaccatcctactaactcctgttggaggctcatcgttcctattcaggcagatgttatcgaggtccgacnnnnnnttaaatctaataattataaacctaaacttgatcggatacgcatgaggct

SEQ ID NO: 6201 - DNA, 146 bp, Artificial Sequence
  Bisulfite Padlock Probe
  misc_feature 92, 93, 94, 95, 96, 97: n = A,T,C or G
gactggaagagcactgtttaaccgcaccgtcctactaactcctgttggaggctcatcgttcctattcaggcagatgttatcgaggtccgacnnnnnnttaaatctaataattataaacctaaacttgatcggatacgcatgaggct

SEQ ID NO: 6202 - DNA, 146 bp, Artificial Sequence
  Bisulfite Padlock Probe
  misc_feature 92, 93, 94, 95, 96, 97: n = A,T,C or G
gactggaagagcactgtttaaccgccgccaaataaaactaaccgttggaggctcatcgttcctattcaggcagatgttatcgaggtccgacnnnnnnaaaaacctaacttaccgaaaaacacatccgatcggatacgcatgaggct

SEQ ID NO: 6203 - DNA, 146 bp, Artificial Sequence
  Bisulfite Padlock Probe
  misc_feature 92, 93, 94, 95, 96, 97: n = A,T,C or G
gactggaagagcactgtttaaccgccgccgaataaaactaaccgttggaggctcatcgttcctattcaggcagatgttatcgaggtccgacnnnnnnaaaaacctaacttaccgaaaaacgcatccgatcggatacgcatgaggct

SEQ ID NO: 6204 - DNA, 146 bp, Artificial Sequence
  Bisulfite Padlock Probe
  misc_feature 94, 95, 96, 97, 98, 99: n = A,T,C or G
gactggaagagcactgtttaaccttccatttttactaaaatttaagttggaggctcatcgttcctattcaggcagatgttatcgaggtccgacnnnnnnccacctcttttctactaaatctaaaaagatcggatacgcatgaggct

SEQ ID NO: 6205 - DNA, 146 bp, Artificial Sequence
  Bisulfite Padlock Probe
  misc_feature 94, 95, 96, 97, 98, 99: n = A,T,C or G
gactggaagagcactgtttaaccttccatttttactaaaatttaagttggaggctcatcgttcctattcaggcagatgttatcgaggtccgacnnnnnnccgcctcttttctactaaatctaaaaagatcggatacgcatgaggct

SEQ ID NO: 6206 - DNA, 146 bp, Artificial Sequence
  Bisulfite Padlock Probe
  misc_feature 92, 93, 94, 95, 96, 97: n = A,T,C or G
gactggaagagcactgtttaaccttttattactaaaatctaacgttggaggctcatcgttcctattcaggcagatgttatcgaggtccgacnnnnnnaaaaatctaaattatatctatccccaatagatcggatacgcatgaggct

SEQ ID NO: 6207 - DNA, 146 bp, Artificial Sequence
  Bisulfite Padlock Probe
  misc_feature 95, 96, 97, 98, 99, 100: n = A,T,C or G
gactggaagagcactgtttaacgcccacgtacaaataataatacaagttggaggctcatcgttcctattcaggcagatgttatcgaggtccgacnnnnnncgacaaaaaccgcactattaaaccccgatcggatacgcatgaggct

SEQ ID NO: 6208 - DNA, 146 bp, Artificial Sequence
  Bisulfite Padlock Probe
  misc_feature 95, 96, 97, 98, 99, 100: n = A,T,C or G
gactggaagagcactgtttaacgcccacgtacgaataataatacaagttggaggctcatcgttcctattcaggcagatgttatcgaggtccgacnnnnnncgacaaaaaccgcgctattaaaccccgatcggatacgcatgaggct

SEQ ID NO: 6209 - DNA, 146 bp, Artificial Sequence
  Bisulfite Padlock Probe
  misc_feature 95, 96, 97, 98, 99, 100: n = A,T,C or G
gactggaagagcactgtttaacgctaaaatcccgaattacatatacgttggaggctcatcgttcctattcaggcagatgttatcgaggtccgacnnnnnnaaaactctttactatcccacaaaatagatcggatacgcatgaggct

SEQ ID NO: 6210 - DNA, 146 bp, Artificial Sequence
  Bisulfite Padlock Probe
  misc_feature 95, 96, 97, 98, 99, 100: n = A,T,C or G
gactggaagagcactgtttaacgctaaaatcccgaattacgtatacgttggaggctcatcgttcctattcaggcagatgttatcgaggtccgacnnnnnnaaaactctttactatcccgcaaaatagatcggatacgcatgaggct

SEQ ID NO: 6211 - DNA, 146 bp, Artificial Sequence
  Bisulfite Padlock Probe
  misc_feature 95, 96, 97, 98, 99, 100: n = A,T,C or G
gactggaagagcactgtttaacgttattttcctcttaactacaaacgttggaggctcatcgttcctattcaggcagatgttatcgaggtccgacnnnnnnaaaaacgcgtctacgaaaaatacgccgatcggatacgcatgaggct

SEQ ID NO: 6212 - DNA, 146 bp, Artificial Sequence
  Bisulfite Padlock Probe
  misc_feature 93, 94, 95, 96, 97, 98: n = A,T,C or G
gactggaagagcactgtttaactaacttcctaaaactttaaaaagttggaggctcatcgttcctattcaggcagatgttatcgaggtccgacnnnnnnacacacgactcccaacacttaaaacctcgatcggatacgcatgaggct

SEQ ID NO: 6213 - DNA, 146 bp, Artificial Sequence
  Bisulfite Padlock Probe
  misc_feature 93, 94, 95, 96, 97, 98: n = A,T,C or G
gactggaagagcactgtttaactaacttcctaaaactttaaaaagttggaggctcatcgttcctattcaggcagatgttatcgaggtccgacnnnnnnacacacgactcccaacgcttaaaacctcgatcggatacgcatgaggct

SEQ ID NO: 6214 - DNA, 146 bp, Artificial Sequence
  Bisulfite Padlock Probe
  misc_feature 93, 94, 95, 96, 97, 98: n = A,T,C or G
gactggaagagcactgtttaactaatacatcccaaaattaaaaagttggaggctcatcgttcctattcaggcagatgttatcgaggtccgacnnnnnnaaaactccacccaaacgaaaacaaaaaagatcggatacgcatgaggct

SEQ ID NO: 6215 - DNA, 146 bp, Artificial Sequence
  Bisulfite Padlock Probe
  misc_feature 93, 94, 95, 96, 97, 98: n = A,T,C or G
gactggaagagcactgtttaactaatacatcccgaaattaaaaagttggaggctcatcgttcctattcaggcagatgttatcgaggtccgacnnnnnnaaaactccacccaaacgaaaacgaaaaagatcggatacgcatgaggct

SEQ ID NO: 6216 - DNA, 146 bp, Artificial Sequence
  Bisulfite Padlock Probe
  misc_feature 92, 93, 94, 95, 96, 97: n = A,T,C or G
gactggaagagcactgtttaactccaaacaacttaaaacaaacgttggaggctcatcgttcctattcaggcagatgttatcgaggtccgacnnnnnnaaaacaatcccacctattccaaaaataccgatcggatacgcatgaggct

SEQ ID NO: 6217 - DNA, 146 bp, Artificial Sequence
  Bisulfite Padlock Probe
  misc_feature 92, 93, 94, 95, 96, 97: n = A,T,C or G
gactggaagagcactgtttaactccaaacaacttaaaacaaacgttggaggctcatcgttcctattcaggcagatgttatcgaggtccgacnnnnnnaaaacaatcccgcctattccaaaaataccgatcggatacgcatgaggct

SEQ ID NO: 6218 - DNA, 146 bp, Artificial Sequence
  Bisulfite Padlock Probe
  misc_feature 93, 94, 95, 96, 97, 98: n = A,T,C or G
gactggaagagcactgtttaactcccgcaaaccactaataatccgttggaggctcatcgttcctattcaggcagatgttatcgaggtccgacnnnnnncatctaaactaacaccgaacaaaaaatcgatcggatacgcatgaggct

SEQ ID NO: 6219 - DNA, 146 bp, Artificial Sequence
  Bisulfite Padlock Probe
  misc_feature 93, 94, 95, 96, 97, 98: n = A,T,C or G
gactggaagagcactgtttaactcccgcaaaccgctaataatccgttggaggctcatcgttcctattcaggcagatgttatcgaggtccgacnnnnnncatctaaactaacaccgaacgaaaaatcgatcggatacgcatgaggct

SEQ ID NO: 6220 - DNA, 146 bp, Artificial Sequence
  Bisulfite Padlock Probe
  misc_feature 94, 95, 96, 97, 98, 99: n = A,T,C or G
gactggaagagcactgtttaactctccttccttcctaaaaacaacgttggaggctcatcgttcctattcaggcagatgttatcgaggtccgacnnnnnnaaaaacccgaaaaactacaaactaaaagatcggatacgcatgaggct

SEQ ID NO: 6221 - DNA, 146 bp, Artificial Sequence
  Bisulfite Padlock Probe
  misc_feature 94, 95, 96, 97, 98, 99: n = A,T,C or G
gactggaagagcactgtttaactctccttccttcctaaaaacgacgttggaggctcatcgttcctattcaggcagatgttatcgaggtccgacnnnnnnaaaaacccgaaaaactacgaactaaaagatcggatacgcatgaggct

SEQ ID NO: 6222 - DNA, 146 bp, Artificial Sequence
  Bisulfite Padlock Probe
  misc_feature 96, 97, 98, 99, 100, 101: n = A,T,C or G
gactggaagagcactgtttaactcttcctcactattactcaaactatgttggaggctcatcgttcctattcaggcagatgttatcgaggtccgacnnnnnncgccacaacccacaaacttcttaccgatcggatacgcatgaggct

SEQ ID NO: 6223 - DNA, 146 bp, Artificial Sequence
  Bisulfite Padlock Probe
  misc_feature 96, 97, 98, 99, 100, 101: n = A,T,C or G
gactggaagagcactgtttaactcttcctcgctattactcaaactatgttggaggctcatcgttcctattcaggcagatgttatcgaggtccgacnnnnnncgccacaacccgcaaacttcttaccgatcggatacgcatgaggct

SEQ ID NO: 6224 - DNA, 146 bp, Artificial Sequence
  Bisulfite Padlock Probe
  misc_feature 95, 96, 97, 98, 99, 100: n = A,T,C or G
gactggaagagcactgtttaactttatttatttatttaaactaaaagttggaggctcatcgttcctattcaggcagatgttatcgaggtccgacnnnnnnaccttttaaaaattctttttataatagatcggatacgcatgaggct

SEQ ID NO: 6225 - DNA, 146 bp, Artificial Sequence
  Bisulfite Padlock Probe
  misc_feature 96, 97, 98, 99, 100, 101: n = A,T,C or G
gactggaagagcactgtttaataaaaacgccatcttccttccttctagttggaggctcatcgttcctattcaggcagatgttatcgaggtccgacnnnnnncccaactccccacctcctcactttcgatcggatacgcatgaggct

SEQ ID NO: 6226 - DNA, 146 bp, Artificial Sequence
  Bisulfite Padlock Probe
  misc_feature 96, 97, 98, 99, 100, 101: n = A,T,C or G
gactggaagagcactgtttaataaaaacgccgtcttccttccttctagttggaggctcatcgttcctattcaggcagatgttatcgaggtccgacnnnnnncccaactccccacctcctcactttcgatcggatacgcatgaggct

SEQ ID NO: 6227 - DNA, 146 bp, Artificial Sequence
  Bisulfite Padlock Probe
  misc_feature 92, 93, 94, 95, 96, 97: n = A,T,C or G
gactggaagagcactgtttaataaaattttaaaaacaaaaaacgttggaggctcatcgttcctattcaggcagatgttatcgaggtccgacnnnnnnaaaaaccgaaaaacccaaaacttcctcccgatcggatacgcatgaggct

SEQ ID NO: 6228 - DNA, 146 bp, Artificial Sequence
  Bisulfite Padlock Probe
  misc_feature 92, 93, 94, 95, 96, 97: n = A,T,C or G
gactggaagagcactgtttaataaaattttaaaaacgaaaaacgttggaggctcatcgttcctattcaggcagatgttatcgaggtccgacnnnnnnaaaaaccgaaaaacccgaaacttcctcccgatcggatacgcatgaggct

SEQ ID NO: 6229 - DNA, 146 bp, Artificial Sequence
  Bisulfite Padlock Probe
  misc_feature 94, 95, 96, 97, 98, 99: n = A,T,C or G
gactggaagagcactgtttaataaataaaattaataacctcacccgttggaggctcatcgttcctattcaggcagatgttatcgaggtccgacnnnnnnataaaaatactcctaaccccaaccttcgatcggatacgcatgaggct

SEQ ID NO: 6230 - DNA, 146 bp, Artificial Sequence
  Bisulfite Padlock Probe
  misc_feature 94, 95, 96, 97, 98, 99: n = A,T,C or G
gactggaagagcactgtttaataaataaaattaataacctcgcccgttggaggctcatcgttcctattcaggcagatgttatcgaggtccgacnnnnnnataaaaatactcctaaccccgaccttcgatcggatacgcatgaggct

SEQ ID NO: 6231 - DNA, 146 bp, Artificial Sequence
  Bisulfite Padlock Probe
  misc_feature 92, 93, 94, 95, 96, 97: n = A,T,C or G
gactggaagagcactgtttaataaatttaaccatctattactagttggaggctcatcgttcctattcaggcagatgttatcgaggtccgacnnnnnnctaaccttcaacaaaaccctaactaaattgatcggatacgcatgaggct

SEQ ID NO: 6232 - DNA, 146 bp, Artificial Sequence
  Bisulfite Padlock Probe
  misc_feature 92, 93, 94, 95, 96, 97: n = A,T,C or G
gactggaagagcactgtttaataaatttaaccatctattactagttggaggctcatcgttcctattcaggcagatgttatcgaggtccgacnnnnnnctaaccttcgacaaaaccctaactaaattgatcggatacgcatgaggct

SEQ ID NO: 6233 - DNA, 146 bp, Artificial Sequence
  Bisulfite Padlock Probe
  misc_feature 92, 93, 94, 95, 96, 97: n = A,T,C or G
gactggaagagcactgtttaataaccctctaatcttccaaaaagttggaggctcatcgttcctattcaggcagatgttatcgaggtccgacnnnnnnccaactactctaaaaccctacaaaccctcgatcggatacgcatgaggct

SEQ ID NO: 6234 - DNA, 146 bp, Artificial Sequence
  Bisulfite Padlock Probe
  misc_feature 94, 95, 96, 97, 98, 99: n = A,T,C or G
gactggaagagcactgtttaataataataataataatacaactacgttggaggctcatcgttcctattcaggcagatgttatcgaggtccgacnnnnnnaccccaaaaataaacaaaacctaaaacgatcggatacgcatgaggct

SEQ ID NO: 6235 - DNA, 146 bp, Artificial Sequence
  Bisulfite Padlock Probe
  misc_feature 94, 95, 96, 97, 98, 99: n = A,T,C or G
gactggaagagcactgtttaataataataataataatacgactacgttggaggctcatcgttcctattcaggcagatgttatcgaggtccgacnnnnnnaccccgaaaataaacaaaacctaaaacgatcggatacgcatgaggct

SEQ ID NO: 6236 - DNA, 146 bp, Artificial Sequence
  Bisulfite Padlock Probe
  misc_feature 95, 96, 97, 98, 99, 100: n = A,T,C or G
gactggaagagcactgtttaatacatattaatcttataaaaataaagttggaggctcatcgttcctattcaggcagatgttatcgaggtccgacnnnnnnataatcaaaaacgctccgcaaaaaccgatcggatacgcatgaggct

SEQ ID NO: 6237 - DNA, 146 bp, Artificial Sequence
  Bisulfite Padlock Probe
  misc_feature 92, 93, 94, 95, 96, 97: n = A,T,C or G
gactggaagagcactgtttaataccacctcttcatctactttcgttggaggctcatcgttcctattcaggcagatgttatcgaggtccgacnnnnnntaatacccaacaacaacctcaatcctaccgatcggatacgcatgaggct

SEQ ID NO: 6238 - DNA, 146 bp, Artificial Sequence
  Bisulfite Padlock Probe
  misc_feature 92, 93, 94, 95, 96, 97: n = A,T,C or G
gactggaagagcactgtttaataccacctcttcatctactttcgttggaggctcatcgttcctattcaggcagatgttatcgaggtccgacnnnnnntaatacccgacaacaacctcaatcctaccgatcggatacgcatgaggct

SEQ ID NO: 6239 - DNA, 146 bp, Artificial Sequence
  Bisulfite Padlock Probe
  misc_feature 92, 93, 94, 95, 96, 97: n = A,T,C or G
gactggaagagcactgtttaataccccaacccaacccactactgttggaggctcatcgttcctattcaggcagatgttatcgaggtccgacnnnnnnaacatcaaataatcgaccataacaacaaagatcggatacgcatgaggct

SEQ ID NO: 6240 - DNA, 146 bp, Artificial Sequence
  Bisulfite Padlock Probe
  misc_feature 92, 93, 94, 95, 96, 97: n = A,T,C or G
gactggaagagcactgtttaataccccgacccaacccactactgttggaggctcatcgttcctattcaggcagatgttatcgaggtccgacnnnnnnaacatcaaataatcgaccataacgacaaagatcggatacgcatgaggct

SEQ ID NO: 6241 - DNA, 146 bp, Artificial Sequence
  Bisulfite Padlock Probe
  misc_feature 95, 96, 97, 98, 99, 100: n = A,T,C or G
gactggaagagcactgtttaatacgtattaatcttataaaaataaagttggaggctcatcgttcctattcaggcagatgttatcgaggtccgacnnnnnnataatcaaaaacgctccgcgaaaaccgatcggatacgcatgaggct

SEQ ID NO: 6242 - DNA, 146 bp, Artificial Sequence
  Bisulfite Padlock Probe
  misc_feature 93, 94, 95, 96, 97, 98: n = A,T,C or G
gactggaagagcactgtttaatactaaacacctactttataatcgttggaggctcatcgttcctattcaggcagatgttatcgaggtccgacnnnnnnaccctatacctcaatttccccatacttcgatcggatacgcatgaggct

SEQ ID NO: 6243 - DNA, 146 bp, Artificial Sequence
  Bisulfite Padlock Probe
  misc_feature 93, 94, 95, 96, 97, 98: n = A,T,C or G
gactggaagagcactgtttaatactaaacgcctactttataatcgttggaggctcatcgttcctattcaggcagatgttatcgaggtccgacnnnnnnaccctatacctcaatttccccatacttcgatcggatacgcatgaggct

SEQ ID NO: 6244 - DNA, 146 bp, Artificial Sequence
  Bisulfite Padlock Probe
  misc_feature 96, 97, 98, 99, 100, 101: n = A,T,C or G
gactggaagagcactgtttaatatataaaattaaaaactacacaaaagttggaggctcatcgttcctattcaggcagatgttatcgaggtccgacnnnnnncccctctaacacctttctccctaccgatcggatacgcatgaggct

SEQ ID NO: 6245 - DNA, 146 bp, Artificial Sequence
  Bisulfite Padlock Probe
  misc_feature 96, 97, 98, 99, 100, 101: n = A,T,C or G
gactggaagagcactgtttaatatataaaattaaaaactacgcaaaagttggaggctcatcgttcctattcaggcagatgttatcgaggtccgacnnnnnncccctctaacgcctttctccctaccgatcggatacgcatgaggct

SEQ ID NO: 6246 - DNA, 146 bp, Artificial Sequence
  Bisulfite Padlock Probe
  misc_feature 95, 96, 97, 98, 99, 100: n = A,T,C or G
gactggaagagcactgtttaatatttattttaaaactactaacaatgttggaggctcatcgttcctattcaggcagatgttatcgaggtccgacnnnnnntaaataataaacaacaacctaacctcgatcggatacgcatgaggct

SEQ ID NO: 6247 - DNA, 146 bp, Artificial Sequence
  Bisulfite Padlock Probe
  misc_feature 95, 96, 97, 98, 99, 100: n = A,T,C or G
gactggaagagcactgtttaatatttattttaaaactactaacaatgttggaggctcatcgttcctattcaggcagatgttatcgaggtccgacnnnnnntaaataataaacaacgacctaacctcgatcggatacgcatgaggct

SEQ ID NO: 6248 - DNA, 146 bp, Artificial Sequence
  Bisulfite Padlock Probe
  misc_feature 96, 97, 98, 99, 100, 101: n = A,T,C or G
gactggaagagcactgtttaatcaataatttaactttaaaaattaatgttggaggctcatcgttcctattcaggcagatgttatcgaggtccgacnnnnnncttcctcaaaatctaaaaattcattgatcggatacgcatgaggct

SEQ ID NO: 6249 - DNA, 146 bp, Artificial Sequence
  Bisulfite Padlock Probe
  misc_feature 93, 94, 95, 96, 97, 98: n = A,T,C or G
gactggaagagcactgtttaatccaaaaaccaccttaaacccccgttggaggctcatcgttcctattcaggcagatgttatcgaggtccgacnnnnnncacaaatccctccccattccctaacttcgatcggatacgcatgaggct

SEQ ID NO: 6250 - DNA, 146 bp, Artificial Sequence
  Bisulfite Padlock Probe
  misc_feature 93, 94, 95, 96, 97, 98: n = A,T,C or G
gactggaagagcactgtttaatccaaaaaccaccttaaacccccgttggaggctcatcgttcctattcaggcagatgttatcgaggtccgacnnnnnncacgaatccctccccattccctaacttcgatcggatacgcatgaggct

SEQ ID NO: 6251 - DNA, 146 bp, Artificial Sequence
  Bisulfite Padlock Probe
  misc_feature 92, 93, 94, 95, 96, 97: n = A,T,C or G
gactggaagagcactgtttaatccataaaaacaaataataaacgttggaggctcatcgttcctattcaggcagatgttatcgaggtccgacnnnnnncgataaccgtataccccaaaataaaaaccgatcggatacgcatgaggct

SEQ ID NO: 6252 - DNA, 146 bp, Artificial Sequence
  Bisulfite Padlock Probe
  misc_feature 92, 93, 94, 95, 96, 97: n = A,T,C or G
gactggaagagcactgtttaatccataaaaacgaataataaacgttggaggctcatcgttcctattcaggcagatgttatcgaggtccgacnnnnnncgataaccgtataccccgaaataaaaaccgatcggatacgcatgaggct

SEQ ID NO: 6253 - DNA, 146 bp, Artificial Sequence
  Bisulfite Padlock Probe
  misc_feature 96, 97, 98, 99, 100, 101: n = A,T,C or G
gactggaagagcactgtttaatcccctctctatacccaaacactaccgttggaggctcatcgttcctattcaggcagatgttatcgaggtccgacnnnnnnaataataaccaaacaccttatccccgatcggatacgcatgaggct

SEQ ID NO: 6254 - DNA, 146 bp, Artificial Sequence
  Bisulfite Padlock Probe
  misc_feature 96, 97, 98, 99, 100, 101: n = A,T,C or G
gactggaagagcactgtttaatcccctctctatacccaaacgctaccgttggaggctcatcgttcctattcaggcagatgttatcgaggtccgacnnnnnnaataataaccgaacaccttatccccgatcggatacgcatgaggct

SEQ ID NO: 6255 - DNA, 146 bp, Artificial Sequence
  Bisulfite Padlock Probe
  misc_feature 92, 93, 94, 95, 96, 97: n = A,T,C or G
gactggaagagcactgtttaatccgcgccaaaaccaaaaccacgttggaggctcatcgttcctattcaggcagatgttatcgaggtccgacnnnnnnaaaaaccaaaacaaacatacactaaaattgatcggatacgcatgaggct

SEQ ID NO: 6256 - DNA, 146 bp, Artificial Sequence
  Bisulfite Padlock Probe
  misc_feature 92, 93, 94, 95, 96, 97: n = A,T,C or G
gactggaagagcactgtttaatccgcgccaaaaccgaaaccacgttggaggctcatcgttcctattcaggcagatgttatcgaggtccgacnnnnnnaaaaaccaaaacaaacatacactaaaattgatcggatacgcatgaggct

SEQ ID NO: 6257 - DNA, 146 bp, Artificial Sequence
  Bisulfite Padlock Probe
  misc_feature 92, 93, 94, 95, 96, 97: n = A,T,C or G
gactggaagagcactgtttaatcgccgacaacacccaaacaacgttggaggctcatcgttcctattcaggcagatgttatcgaggtccgacnnnnnnctcataccaattacaaaccccctcccctcgatcggatacgcatgaggct

SEQ ID NO: 6258 - DNA, 146 bp, Artificial Sequence
  Bisulfite Padlock Probe
  misc_feature 92, 93, 94, 95, 96, 97: n = A,T,C or G
gactggaagagcactgtttaatcgccgacaacacccgaacaacgttggaggctcatcgttcctattcaggcagatgttatcgaggtccgacnnnnnnctcataccaattacaaaccccctcccctcgatcggatacgcatgaggct

SEQ ID NO: 6259 - DNA, 146 bp, Artificial Sequence
  Bisulfite Padlock Probe
  misc_feature 93, 94, 95, 96, 97, 98: n = A,T,C or G
gactggaagagcactgtttaatctcaaaaactatctttataaacgttggaggctcatcgttcctattcaggcagatgttatcgaggtccgacnnnnnnacaaataaatcacaacttctcccctttcgatcggatacgcatgaggct

SEQ ID NO: 6260 - DNA, 146 bp, Artificial Sequence
  Bisulfite Padlock Probe
  misc_feature 92, 93, 94, 95, 96, 97: n = A,T,C or G
gactggaagagcactgtttaattaaaaacacaatttaaacaaagttggaggctcatcgttcctattcaggcagatgttatcgaggtccgacnnnnnncctaaccatataaaaactaaaccaaaaccgatcggatacgcatgaggct

SEQ ID NO: 6261 - DNA, 146 bp, Artificial Sequence
  Bisulfite Padlock Probe
  misc_feature 92, 93, 94, 95, 96, 97: n = A,T,C or G
gactggaagagcactgtttaattaaaaacacaatttaaacgaagttggaggctcatcgttcctattcaggcagatgttatcgaggtccgacnnnnnncctaaccatataaaaactaaaccgaaaccgatcggatacgcatgaggct

SEQ ID NO: 6262 - DNA, 146 bp, Artificial Sequence
  Bisulfite Padlock Probe
  misc_feature 93, 94, 95, 96, 97, 98: n = A,T,C or G
gactggaagagcactgtttaattcccaacttaaaaatcttatccgttggaggctcatcgttcctattcaggcagatgttatcgaggtccgacnnnnnncaaccccttttccaactaaaaacaacccgatcggatacgcatgaggct

SEQ ID NO: 6263 - DNA, 146 bp, Artificial Sequence
  Bisulfite Padlock Probe
  misc_feature 93, 94, 95, 96, 97, 98: n = A,T,C or G
gactggaagagcactgtttaattcccgacttaaaaatcttatccgttggaggctcatcgttcctattcaggcagatgttatcgaggtccgacnnnnnncaaccccttttccaactaaaaacaacccgatcggatacgcatgaggct

SEQ ID NO: 6264 - DNA, 146 bp, Artificial Sequence
  Bisulfite Padlock Probe
  misc_feature 93, 94, 95, 96, 97, 98: n = A,T,C or G
gactggaagagcactgtttaatttaaaataataactaccaaaaagttggaggctcatcgttcctattcaggcagatgttatcgaggtccgacnnnnnnattattacccaatctcccaactaatatcgatcggatacgcatgaggct

SEQ ID NO: 6265 - DNA, 146 bp, Artificial Sequence
  Bisulfite Padlock Probe
  misc_feature 94, 95, 96, 97, 98, 99: n = A,T,C or G
gactggaagagcactgtttaatttccgaaccgaatcccaaccatcgttggaggctcatcgttcctattcaggcagatgttatcgaggtccgacnnnnnnaaaaacgaaaccgacaaaaactatatcgatcggatacgcatgaggct

SEQ ID NO: 6266 - DNA, 146 bp, Artificial Sequence
  Bisulfite Padlock Probe
  misc_feature 94, 95, 96, 97, 98, 99: n = A,T,C or G
gactggaagagcactgtttaatttccgaaccgaatcccgaccatcgttggaggctcatcgttcctattcaggcagatgttatcgaggtccgacnnnnnnaaaaacgaaaccgacgaaaactatatcgatcggatacgcatgaggct

SEQ ID NO: 6267 - DNA, 146 bp, Artificial Sequence
  Bisulfite Padlock Probe
  misc_feature 94, 95, 96, 97, 98, 99: n = A,T,C or G
gactggaagagcactgtttaattttctacctaaacctctccttcagttggaggctcatcgttcctattcaggcagatgttatcgaggtccgacnnnnnnacgcaacccctctccaaaaaacaaaaagatcggatacgcatgaggct

SEQ ID NO: 6268 - DNA, 146 bp, Artificial Sequence
  Bisulfite Padlock Probe
  misc_feature 94, 95, 96, 97, 98, 99: n = A,T,C or G
gactggaagagcactgtttaattttctacctaaacctctccttcagttggaggctcatcgttcctattcaggcagatgttatcgaggtccgacnnnnnnacgcaacccctctccgaaaaacaaaaagatcggatacgcatgaggct

SEQ ID NO: 6269 - DNA, 146 bp, Artificial Sequence
  Bisulfite Padlock Probe
  misc_feature 96, 97, 98, 99, 100, 101: n = A,T,C or G
gactggaagagcactgtttacaaaaacgtacgcgactccttccaaaagttggaggctcatcgttcctattcaggcagatgttatcgaggtccgacnnnnnncgaccgcgaacctaaacgcaaaaaagatcggatacgcatgaggct

SEQ ID NO: 6270 - DNA, 146 bp, Artificial Sequence
  Bisulfite Padlock Probe
  misc_feature 96, 97, 98, 99, 100, 101: n = A,T,C or G
gactggaagagcactgtttacaaaaacgtacgcgactccttccgaaagttggaggctcatcgttcctattcaggcagatgttatcgaggtccgacnnnnnncgaccgcgaacctaaacgcgaaaaagatcggatacgcatgaggct

SEQ ID NO: 6271 - DNA, 146 bp, Artificial Sequence
  Bisulfite Padlock Probe
  misc_feature 92, 93, 94, 95, 96, 97: n = A,T,C or G
gactggaagagcactgtttacaaaacgcgaaacccaaaaactcgttggaggctcatcgttcctattcaggcagatgttatcgaggtccgacnnnnnnaatccaactaaatctccatcctccctatagatcggatacgcatgaggct

SEQ ID NO: 6272 - DNA, 146 bp, Artificial Sequence
  Bisulfite Padlock Probe
  misc_feature 92, 93, 94, 95, 96, 97: n = A,T,C or G
gactggaagagcactgtttacaaaacgcgaaacccgaaaactcgttggaggctcatcgttcctattcaggcagatgttatcgaggtccgacnnnnnnaatccgactaaatctccatcctccctatagatcggatacgcatgaggct

SEQ ID NO: 6273 - DNA, 146 bp, Artificial Sequence
  Bisulfite Padlock Probe
  misc_feature 93, 94, 95, 96, 97, 98: n = A,T,C or G
gactggaagagcactgtttacaaacttaaatctcaattcaaaaagttggaggctcatcgttcctattcaggcagatgttatcgaggtccgacnnnnnnactaatactaaaaatccatacccatcccgatcggatacgcatgaggct

SEQ ID NO: 6274 - DNA, 146 bp, Artificial Sequence
  Bisulfite Padlock Probe
  misc_feature 93, 94, 95, 96, 97, 98: n = A,T,C or G
gactggaagagcactgtttacaaacttaaatctcgattcaaaaagttggaggctcatcgttcctattcaggcagatgttatcgaggtccgacnnnnnnactaatactaaaaatccgtacccatcccgatcggatacgcatgaggct

SEQ ID NO: 6275 - DNA, 146 bp, Artificial Sequence
  Bisulfite Padlock Probe
  misc_feature 92, 93, 94, 95, 96, 97: n = A,T,C or G
gactggaagagcactgtttacaaataaaacaactaaaaccaccgttggaggctcatcgttcctattcaggcagatgttatcgaggtccgacnnnnnnacccactaactaccacccaattacaactagatcggatacgcatgaggct

SEQ ID NO: 6276 - DNA, 146 bp, Artificial Sequence
  Bisulfite Padlock Probe
  misc_feature 92, 93, 94, 95, 96, 97: n = A,T,C or G
gactggaagagcactgtttacaaataaaacaactaaaaccgccgttggaggctcatcgttcctattcaggcagatgttatcgaggtccgacnnnnnnacccactaactaccacccaattacaactagatcggatacgcatgaggct

SEQ ID NO: 6277 - DNA, 146 bp, Artificial Sequence
  Bisulfite Padlock Probe
  misc_feature 92, 93, 94, 95, 96, 97: n = A,T,C or G
gactggaagagcactgtttacaaccatttaattaaaaatttacgttggaggctcatcgttcctattcaggcagatgttatcgaggtccgacnnnnnnaaaaacgtaaaacgaacccgaaacactacgatcggatacgcatgaggct

SEQ ID NO: 6278 - DNA, 146 bp, Artificial Sequence
  Bisulfite Padlock Probe
  misc_feature 92, 93, 94, 95, 96, 97: n = A,T,C or G
gactggaagagcactgtttacaaccatttaattaaaaatttacgttggaggctcatcgttcctattcaggcagatgttatcgaggtccgacnnnnnnaaaaacgtaaaacgaacccgaaacgctacgatcggatacgcatgaggct

SEQ ID NO: 6279 - DNA, 146 bp, Artificial Sequence
  Bisulfite Padlock Probe
  misc_feature 92, 93, 94, 95, 96, 97: n = A,T,C or G
gactggaagagcactgtttacaaccccgacaccgaccaaaaaagttggaggctcatcgttcctattcaggcagatgttatcgaggtccgacnnnnnnaaaaatcataatattcgcactcataaacagatcggatacgcatgaggct

SEQ ID NO: 6280 - DNA, 146 bp, Artificial Sequence
  Bisulfite Padlock Probe
  misc_feature 92, 93, 94, 95, 96, 97: n = A,T,C or G
gactggaagagcactgtttacaaccccgacaccgaccaaaaaagttggaggctcatcgttcctattcaggcagatgttatcgaggtccgacnnnnnncccccaaaatcataaaaatcataatattcgatcggatacgcatgaggct

SEQ ID NO: 6281 - DNA, 146 bp, Artificial Sequence
  Bisulfite Padlock Probe
  misc_feature 92, 93, 94, 95, 96, 97: n = A,T,C or G
gactggaagagcactgtttacaaccccgacaccgaccgaaaaagttggaggctcatcgttcctattcaggcagatgttatcgaggtccgacnnnnnnaaaaatcataatattcgcgctcataaacagatcggatacgcatgaggct

SEQ ID NO: 6282 - DNA, 146 bp, Artificial Sequence
  Bisulfite Padlock Probe
  misc_feature 92, 93, 94, 95, 96, 97: n = A,T,C or G
gactggaagagcactgtttacaaccccgacaccgaccgaaaaagttggaggctcatcgttcctattcaggcagatgttatcgaggtccgacnnnnnncccccaaaatcataaaaatcataatattcgatcggatacgcatgaggct

SEQ ID NO: 6283 - DNA, 146 bp, Artificial Sequence
  Bisulfite Padlock Probe
  misc_feature 92, 93, 94, 95, 96, 97: n = A,T,C or G
gactggaagagcactgtttacaactaaccccaccaaaaacaccgttggaggctcatcgttcctattcaggcagatgttatcgaggtccgacnnnnnncttttaaactattatataatcactaactcgatcggatacgcatgaggct

SEQ ID NO: 6284 - DNA, 146 bp, Artificial Sequence
  Bisulfite Padlock Probe
  misc_feature 92, 93, 94, 95, 96, 97: n = A,T,C or G
gactggaagagcactgtttacaactaaccccaccaaaaacgccgttggaggctcatcgttcctattcaggcagatgttatcgaggtccgacnnnnnncttttaaactattatataatcactaactcgatcggatacgcatgaggct

SEQ ID NO: 6285 - DNA, 146 bp, Artificial Sequence
  Bisulfite Padlock Probe
  misc_feature 94, 95, 96, 97, 98, 99: n = A,T,C or G
gactggaagagcactgtttacaactactacccctacttataaatagttggaggctcatcgttcctattcaggcagatgttatcgaggtccgacnnnnnncccccgaaaacaaaacccaaaccaatcgatcggatacgcatgaggct

SEQ ID NO: 6286 - DNA, 146 bp, Artificial Sequence
  Bisulfite Padlock Probe
  misc_feature 93, 94, 95, 96, 97, 98: n = A,T,C or G
gactggaagagcactgtttacaacttaaccaacaaaataatatcgttggaggctcatcgttcctattcaggcagatgttatcgaggtccgacnnnnnntcacctaccactatcctccttcactatcgatcggatacgcatgaggct

SEQ ID NO: 6287 - DNA, 146 bp, Artificial Sequence
  Bisulfite Padlock Probe
  misc_feature 93, 94, 95, 96, 97, 98: n = A,T,C or G
gactggaagagcactgtttacaacttaaccaacgaaataatatcgttggaggctcatcgttcctattcaggcagatgttatcgaggtccgacnnnnnntcacctaccgctatcctccttcactatcgatcggatacgcatgaggct

SEQ ID NO: 6288 - DNA, 146 bp, Artificial Sequence
  Bisulfite Padlock Probe
  misc_feature 95, 96, 97, 98, 99, 100: n = A,T,C or G
gactggaagagcactgtttacaacttctctttaaaaaccccaacacgttggaggctcatcgttcctattcaggcagatgttatcgaggtccgacnnnnnnactatcgcaaaaccaacccaaaacccgatcggatacgcatgaggct

SEQ ID NO: 6289 - DNA, 146 bp, Artificial Sequence
  Bisulfite Padlock Probe
  misc_feature 95, 96, 97, 98, 99, 100: n = A,T,C or G
gactggaagagcactgtttacaacttctctttaaaaaccccgacacgttggaggctcatcgttcctattcaggcagatgttatcgaggtccgacnnnnnnactatcgcgaaaccaacccaaaacccgatcggatacgcatgaggct

SEQ ID NO: 6290 - DNA, 146 bp, Artificial Sequence
  Bisulfite Padlock Probe
  misc_feature 92, 93, 94, 95, 96, 97: n = A,T,C or G
gactggaagagcactgtttacaatactcttatatattaacaccgttggaggctcatcgttcctattcaggcagatgttatcgaggtccgacnnnnnnaacccaaaaacataatccccactaactaagatcggatacgcatgaggct

SEQ ID NO: 6291 - DNA, 146 bp, Artificial Sequence
  Bisulfite Padlock Probe
  misc_feature 92, 93, 94, 95, 96, 97: n = A,T,C or G
gactggaagagcactgtttacaatactcttatatattaacgccgttggaggctcatcgttcctattcaggcagatgttatcgaggtccgacnnnnnnaacccaaaaacataatccccgctaactaagatcggatacgcatgaggct

SEQ ID NO: 6292 - DNA, 146 bp, Artificial Sequence
  Bisulfite Padlock Probe
  misc_feature 96, 97, 98, 99, 100, 101: n = A,T,C or G
gactggaagagcactgtttacaatccaaaccccaaattttcaccctagttggaggctcatcgttcctattcaggcagatgttatcgaggtccgacnnnnnntaacccctaaccccacctcatactagatcggatacgcatgaggct

SEQ ID NO: 6293 - DNA, 146 bp, Artificial Sequence
  Bisulfite Padlock Probe
  misc_feature 96, 97, 98, 99, 100, 101: n = A,T,C or G
gactggaagagcactgtttacaatccaaaccccaaattttcaccctagttggaggctcatcgttcctattcaggcagatgttatcgaggtccgacnnnnnntaacccctaaccccgcctcatactagatcggatacgcatgaggct

SEQ ID NO: 6294 - DNA, 146 bp, Artificial Sequence
  Bisulfite Padlock Probe
  misc_feature 94, 95, 96, 97, 98, 99: n = A,T,C or G
gactggaagagcactgtttacaattaaacaaaatcaaaaccttacgttggaggctcatcgttcctattcaggcagatgttatcgaggtccgacnnnnnnaaaaacccgcaaaaacccataaaacccgatcggatacgcatgaggct

SEQ ID NO: 6295 - DNA, 146 bp, Artificial Sequence
  Bisulfite Padlock Probe
  misc_feature 94, 95, 96, 97, 98, 99: n = A,T,C or G
gactggaagagcactgtttacaattaaacaaaatcaaaaccttacgttggaggctcatcgttcctattcaggcagatgttatcgaggtccgacnnnnnnaaaaacccgcaaaaacccgtaaaacccgatcggatacgcatgaggct

SEQ ID NO: 6296 - DNA, 146 bp, Artificial Sequence
  Bisulfite Padlock Probe
  misc_feature 94, 95, 96, 97, 98, 99: n = A,T,C or G
gactggaagagcactgtttacacaaaacaaaataataaaatacccgttggaggctcatcgttcctattcaggcagatgttatcgaggtccgacnnnnnnaaactctccccaaatcccaaccctatcgatcggatacgcatgaggct

SEQ ID NO: 6297 - DNA, 146 bp, Artificial Sequence
  Bisulfite Padlock Probe
  misc_feature 92, 93, 94, 95, 96, 97: n = A,T,C or G
gactggaagagcactgtttacacattaactataaaccaaaaaagttggaggctcatcgttcctattcaggcagatgttatcgaggtccgacnnnnnnatacaaaaacgcccatctacctacaaaacgatcggatacgcatgaggct

SEQ ID NO: 6298 - DNA, 146 bp, Artificial Sequence
  Bisulfite Padlock Probe
  misc_feature 92, 93, 94, 95, 96, 97: n = A,T,C or G
gactggaagagcactgtttacacattaactataaaccgaaaaagttggaggctcatcgttcctattcaggcagatgttatcgaggtccgacnnnnnnatacaaaaacgcccgtctacctacaaaacgatcggatacgcatgaggct

SEQ ID NO: 6299 - DNA, 146 bp, Artificial Sequence
  Bisulfite Padlock Probe
  misc_feature 92, 93, 94, 95, 96, 97: n = A,T,C or G
gactggaagagcactgtttacacccccactataactctaaaacgttggaggctcatcgttcctattcaggcagatgttatcgaggtccgacnnnnnnacttatacttaaaactattccaactaaaagatcggatacgcatgaggct

SEQ ID NO: 6300 - DNA, 146 bp, Artificial Sequence
  Bisulfite Padlock Probe
  misc_feature 92, 93, 94, 95, 96, 97: n = A,T,C or G
gactggaagagcactgtttacacccccgctataactctaaaacgttggaggctcatcgttcctattcaggcagatgttatcgaggtccgacnnnnnnacttatacttaaaactattccaactaaaagatcggatacgcatgaggct

SEQ ID NO: 6301 - DNA, 146 bp, Artificial Sequence
  Bisulfite Padlock Probe
  misc_feature 92, 93, 94, 95, 96, 97: n = A,T,C or G
gactggaagagcactgtttacaccctccacctacaccctccacgttggaggctcatcgttcctattcaggcagatgttatcgaggtccgacnnnnnnaaaaaccccacaacctccctacccaattcgatcggatacgcatgaggct

SEQ ID NO: 6302 - DNA, 146 bp, Artificial Sequence
  Bisulfite Padlock Probe
  misc_feature 96, 97, 98, 99, 100, 101: n = A,T,C or G
gactggaagagcactgtttacacgacgatacctaccataacctcttcgttggaggctcatcgttcctattcaggcagatgttatcgaggtccgacnnnnnncatcctactaactaaaaacttcaccgatcggatacgcatgaggct

SEQ ID NO: 6303 - DNA, 146 bp, Artificial Sequence
  Bisulfite Padlock Probe
  misc_feature 96, 97, 98, 99, 100, 101: n = A,T,C or G
gactggaagagcactgtttacacgacgatacctaccgtaacctcttcgttggaggctcatcgttcctattcaggcagatgttatcgaggtccgacnnnnnncatcctactaactaaaaacttcaccgatcggatacgcatgaggct

SEQ ID NO: 6304 - DNA, 146 bp, Artificial Sequence
  Bisulfite Padlock Probe
  misc_feature 92, 93, 94, 95, 96, 97: n = A,T,C or G
gactggaagagcactgtttacactaaccctattcccccactacgttggaggctcatcgttcctattcaggcagatgttatcgaggtccgacnnnnnnaacaccaacttctcttcctaacaaatccagatcggatacgcatgaggct

SEQ ID NO: 6305 - DNA, 146 bp, Artificial Sequence
  Bisulfite Padlock Probe
  misc_feature 92, 93, 94, 95, 96, 97: n = A,T,C or G
gactggaagagcactgtttacactaaccctattcccccgctacgttggaggctcatcgttcctattcaggcagatgttatcgaggtccgacnnnnnnaacaccaacttctcttcctaacaaatccagatcggatacgcatgaggct

SEQ ID NO: 6306 - DNA, 146 bp, Artificial Sequence
  Bisulfite Padlock Probe
  misc_feature 92, 93, 94, 95, 96, 97: n = A,T,C or G
gactggaagagcactgtttacatacacatctactactcctcaagttggaggctcatcgttcctattcaggcagatgttatcgaggtccgacnnnnnnttaactacttaacgcccgacaccctaatcgatcggatacgcatgaggct

SEQ ID NO: 6307 - DNA, 146 bp, Artificial Sequence
  Bisulfite Padlock Probe
  misc_feature 92, 93, 94, 95, 96, 97: n = A,T,C or G
gactggaagagcactgtttacatacgcatctactactcctcaagttggaggctcatcgttcctattcaggcagatgttatcgaggtccgacnnnnnnttaactacttaacgcccgacgccctaatcgatcggatacgcatgaggct

SEQ ID NO: 6308 - DNA, 146 bp, Artificial Sequence
  Bisulfite Padlock Probe
  misc_feature 96, 97, 98, 99, 100, 101: n = A,T,C or G
gactggaagagcactgtttacatactaatcatctcgcacaaatccccgttggaggctcatcgttcctattcaggcagatgttatcgaggtccgacnnnnnnactcgtaaatcgccgccacaaaatcgatcggatacgcatgaggct

SEQ ID NO: 6309 - DNA, 146 bp, Artificial Sequence
  Bisulfite Padlock Probe
  misc_feature 96, 97, 98, 99, 100, 101: n = A,T,C or G
gactggaagagcactgtttacatactaatcatctcgcgcaaatccccgttggaggctcatcgttcctattcaggcagatgttatcgaggtccgacnnnnnnactcgtaaatcgccgccgcaaaatcgatcggatacgcatgaggct

SEQ ID NO: 6310 - DNA, 146 bp, Artificial Sequence
  Bisulfite Padlock Probe
  misc_feature 93, 94, 95, 96, 97, 98: n = A,T,C or G
gactggaagagcactgtttacatatctacgccgaacccaaacccgttggaggctcatcgttcctattcaggcagatgttatcgaggtccgacnnnnnnacgaaaacgcgcactcctacataatctcgatcggatacgcatgaggct

SEQ ID NO: 6311 - DNA, 146 bp, Artificial Sequence
  Bisulfite Padlock Probe
  misc_feature 93, 94, 95, 96, 97, 98: n = A,T,C or G
gactggaagagcactgtttacatatctacgccgaacccgaacccgttggaggctcatcgttcctattcaggcagatgttatcgaggtccgacnnnnnnacgaaaacgcgcactcctacgtaatctcgatcggatacgcatgaggct

SEQ ID NO: 6312 - DNA, 146 bp, Artificial Sequence
  Bisulfite Padlock Probe
  misc_feature 93, 94, 95, 96, 97, 98: n = A,T,C or G
gactggaagagcactgtttacattacaaaataactaaaacacacgttggaggctcatcgttcctattcaggcagatgttatcgaggtccgacnnnnnnaatttaacctctaattaaactaaatatcgatcggatacgcatgaggct

SEQ ID NO: 6313 - DNA, 146 bp, Artificial Sequence
  Bisulfite Padlock Probe
  misc_feature 93, 94, 95, 96, 97, 98: n = A,T,C or G
gactggaagagcactgtttacattacgaaataactaaaacacacgttggaggctcatcgttcctattcaggcagatgttatcgaggtccgacnnnnnnaatttaacctctaattaaactaaatatcgatcggatacgcatgaggct

SEQ ID NO: 6314 - DNA, 146 bp, Artificial Sequence
  Bisulfite Padlock Probe
  misc_feature 96, 97, 98, 99, 100, 101: n = A,T,C or G
gactggaagagcactgtttaccaaaacaaaactaataaaatccctacgttggaggctcatcgttcctattcaggcagatgttatcgaggtccgacnnnnnnaaacacaactttacaaaaacaaaaagatcggatacgcatgaggct

SEQ ID NO: 6315 - DNA, 146 bp, Artificial Sequence
  Bisulfite Padlock Probe
  misc_feature 96, 97, 98, 99, 100, 101: n = A,T,C or G
gactggaagagcactgtttaccaaaacaaaactaataaaatccctacgttggaggctcatcgttcctattcaggcagatgttatcgaggtccgacnnnnnnaaacgcaactttacaaaaacaaaaagatcggatacgcatgaggct

SEQ ID NO: 6316 - DNA, 146 bp, Artificial Sequence
  Bisulfite Padlock Probe
  misc_feature 92, 93, 94, 95, 96, 97: n = A,T,C or G
gactggaagagcactgtttaccaacacccaccacaaacaaaaagttggaggctcatcgttcctattcaggcagatgttatcgaggtccgacnnnnnnaacaaataaataaaatactaaaaaccctcgatcggatacgcatgaggct

SEQ ID NO: 6317 - DNA, 146 bp, Artificial Sequence
  Bisulfite Padlock Probe
  misc_feature 92, 93, 94, 95, 96, 97: n = A,T,C or G
gactggaagagcactgtttaccaacacccaccacgaacaaaaagttggaggctcatcgttcctattcaggcagatgttatcgaggtccgacnnnnnnaacaaataaataaaatactaaaaaccctcgatcggatacgcatgaggct

SEQ ID NO: 6318 - DNA, 146 bp, Artificial Sequence
  Bisulfite Padlock Probe
  misc_feature 95, 96, 97, 98, 99, 100: n = A,T,C or G
gactggaagagcactgtttaccaccgtctacctcaaactaaaccacgttggaggctcatcgttcctattcaggcagatgttatcgaggtccgacnnnnnntacaactcctccctaaccaacaaaaagatcggatacgcatgaggct

SEQ ID NO: 6319 - DNA, 146 bp, Artificial Sequence
  Bisulfite Padlock Probe
  misc_feature 95, 96, 97, 98, 99, 100: n = A,T,C or G
gactggaagagcactgtttaccaccgtctacctcgaactaaaccacgttggaggctcatcgttcctattcaggcagatgttatcgaggtccgacnnnnnntacaactcctccctaaccaacaaaaagatcggatacgcatgaggct

SEQ ID NO: 6320 - DNA, 146 bp, Artificial Sequence
  Bisulfite Padlock Probe
  misc_feature 96, 97, 98, 99, 100, 101: n = A,T,C or G
gactggaagagcactgtttacccaacctaataaaccacaaaaaccaagttggaggctcatcgttcctattcaggcagatgttatcgaggtccgacnnnnnnaaaacacgtccaacaccaacatacagatcggatacgcatgaggct

SEQ ID NO: 6321 - DNA, 146 bp, Artificial Sequence
  Bisulfite Padlock Probe
  misc_feature 96, 97, 98, 99, 100, 101: n = A,T,C or G
gactggaagagcactgtttacccaacctaataaaccacgaaaaccaagttggaggctcatcgttcctattcaggcagatgttatcgaggtccgacnnnnnnaaaacacgtccaacgccaacatacagatcggatacgcatgaggct

SEQ ID NO: 6322 - DNA, 146 bp, Artificial Sequence
  Bisulfite Padlock Probe
  misc_feature 95, 96, 97, 98, 99, 100: n = A,T,C or G
gactggaagagcactgtttacccataaatctaaactttatatacctgttggaggctcatcgttcctattcaggcagatgttatcgaggtccgacnnnnnntcctcaccaccaatctatacctactcgatcggatacgcatgaggct

SEQ ID NO: 6323 - DNA, 146 bp, Artificial Sequence
  Bisulfite Padlock Probe
  misc_feature 93, 94, 95, 96, 97, 98: n = A,T,C or G
gactggaagagcactgtttacccgaacgcaaacaacaacaaaaagttggaggctcatcgttcctattcaggcagatgttatcgaggtccgacnnnnnntattcctaaaatccaaataaaccaaatcgatcggatacgcatgaggct

SEQ ID NO: 6324 - DNA, 146 bp, Artificial Sequence
  Bisulfite Padlock Probe
  misc_feature 93, 94, 95, 96, 97, 98: n = A,T,C or G
gactggaagagcactgtttacccgaacgcgaacaacaacaaaaagttggaggctcatcgttcctattcaggcagatgttatcgaggtccgacnnnnnntattcctaaaatccaaataaaccaaatcgatcggatacgcatgaggct

SEQ ID NO: 6325 - DNA, 146 bp, Artificial Sequence
  Bisulfite Padlock Probe
  misc_feature 92, 93, 94, 95, 96, 97: n = A,T,C or G
gactggaagagcactgtttacccgccatcttcctctactcctcgttggaggctcatcgttcctattcaggcagatgttatcgaggtccgacnnnnnncctaaacctaatacatataacctcaacccgatcggatacgcatgaggct

SEQ ID NO: 6326 - DNA, 146 bp, Artificial Sequence
  Bisulfite Padlock Probe
  misc_feature 92, 93, 94, 95, 96, 97: n = A,T,C or G
gactggaagagcactgtttacccgccgtcttcctctactcctcgttggaggctcatcgttcctattcaggcagatgttatcgaggtccgacnnnnnncctaaacctaatacgtataacctcaacccgatcggatacgcatgaggct

SEQ ID NO: 6327 - DNA, 146 bp, Artificial Sequence
  Bisulfite Padlock Probe
  misc_feature 95, 96, 97, 98, 99, 100: n = A,T,C or G
gactggaagagcactgtttacccgtaaatctaaactttatatacctgttggaggctcatcgttcctattcaggcagatgttatcgaggtccgacnnnnnntcctcaccgccaatctatacctactcgatcggatacgcatgaggct

SEQ ID NO: 6328 - DNA, 146 bp, Artificial Sequence
  Bisulfite Padlock Probe
  misc_feature 94, 95, 96, 97, 98, 99: n = A,T,C or G
gactggaagagcactgtttaccgaaaacaaaaacaacaaaccctcgttggaggctcatcgttcctattcaggcagatgttatcgaggtccgacnnnnnnacttcctttatctctactcccaccctcgatcggatacgcatgaggct

SEQ ID NO: 6329 - DNA, 146 bp, Artificial Sequence
  Bisulfite Padlock Probe
  misc_feature 94, 95, 96, 97, 98, 99: n = A,T,C or G
gactggaagagcactgtttaccgaaaacgaaaacaacaaaccctcgttggaggctcatcgttcctattcaggcagatgttatcgaggtccgacnnnnnnacttcctttatctctactcccgccctcgatcggatacgcatgaggct

SEQ ID NO: 6330 - DNA, 146 bp, Artificial Sequence
  Bisulfite Padlock Probe
  misc_feature 92, 93, 94, 95, 96, 97: n = A,T,C or G
gactggaagagcactgtttaccgaaccaccacttaaaacacccgttggaggctcatcgttcctattcaggcagatgttatcgaggtccgacnnnnnncacacttacaactctatcacaatcccttcgatcggatacgcatgaggct

SEQ ID NO: 6331 - DNA, 146 bp, Artificial Sequence
  Bisulfite Padlock Probe
  misc_feature 92, 93, 94, 95, 96, 97: n = A,T,C or G
gactggaagagcactgtttaccgaaccaccgcttaaaacacccgttggaggctcatcgttcctattcaggcagatgttatcgaggtccgacnnnnnncacacttacaactctatcacaatcccttcgatcggatacgcatgaggct

SEQ ID NO: 6332 - DNA, 146 bp, Artificial Sequence
  Bisulfite Padlock Probe
  misc_feature 92, 93, 94, 95, 96, 97: n = A,T,C or G
gactggaagagcactgtttaccgcaaaatcccgaacccaaatcgttggaggctcatcgttcctattcaggcagatgttatcgaggtccgacnnnnnncttccccaacgaactaccaaacttaaaacgatcggatacgcatgaggct

SEQ ID NO: 6333 - DNA, 146 bp, Artificial Sequence
  Bisulfite Padlock Probe
  misc_feature 92, 93, 94, 95, 96, 97: n = A,T,C or G
gactggaagagcactgtttaccgcaaaatcccgaacccgaatcgttggaggctcatcgttcctattcaggcagatgttatcgaggtccgacnnnnnncttccccaacgaactaccgaacttaaaacgatcggatacgcatgaggct

SEQ ID NO: 6334 - DNA, 146 bp, Artificial Sequence
  Bisulfite Padlock Probe
  misc_feature 92, 93, 94, 95, 96, 97: n = A,T,C or G
gactggaagagcactgtttacctaaatcataaaatccccttaagttggaggctcatcgttcctattcaggcagatgttatcgaggtccgacnnnnnntaactaacgacgctacgaacgcaaataccgatcggatacgcatgaggct

SEQ ID NO: 6335 - DNA, 146 bp, Artificial Sequence
  Bisulfite Padlock Probe
  misc_feature 92, 93, 94, 95, 96, 97: n = A,T,C or G
gactggaagagcactgtttacctaaatcgtaaaatccccttaagttggaggctcatcgttcctattcaggcagatgttatcgaggtccgacnnnnnntaactaacgacgctacgaacgcgaataccgatcggatacgcatgaggct

SEQ ID NO: 6336 - DNA, 146 bp, Artificial Sequence
  Bisulfite Padlock Probe
  misc_feature 95, 96, 97, 98, 99, 100: n = A,T,C or G
gactggaagagcactgtttacctaccaacatacaaaactacaaaaagttggaggctcatcgttcctattcaggcagatgttatcgaggtccgacnnnnnnaaaaataaacacaactaatccaacccgatcggatacgcatgaggct

SEQ ID NO: 6337 - DNA, 146 bp, Artificial Sequence
  Bisulfite Padlock Probe
  misc_feature 95, 96, 97, 98, 99, 100: n = A,T,C or G
gactggaagagcactgtttacctaccaacgtacaaaactacaaaaagttggaggctcatcgttcctattcaggcagatgttatcgaggtccgacnnnnnnaaaaataaacgcaactaatccaacccgatcggatacgcatgaggct

SEQ ID NO: 6338 - DNA, 146 bp, Artificial Sequence
  Bisulfite Padlock Probe
  misc_feature 92, 93, 94, 95, 96, 97: n = A,T,C or G
gactggaagagcactgtttacctacctaatactcatccaaaaagttggaggctcatcgttcctattcaggcagatgttatcgaggtccgacnnnnnnaaaacgcaaacccaatctcctttcctaccgatcggatacgcatgaggct

SEQ ID NO: 6339 - DNA, 146 bp, Artificial Sequence
  Bisulfite Padlock Probe
  misc_feature 92, 93, 94, 95, 96, 97: n = A,T,C or G
gactggaagagcactgtttacctacctaatactcatccaaaaagttggaggctcatcgttcctattcaggcagatgttatcgaggtccgacnnnnnnaaaacgcgaacccaatctcctttcctaccgatcggatacgcatgaggct

SEQ ID NO: 6340 - DNA, 146 bp, Artificial Sequence
  Bisulfite Padlock Probe
  misc_feature 92, 93, 94, 95, 96, 97: n = A,T,C or G
gactggaagagcactgtttacctattacaaaattcaaaaccctgttggaggctcatcgttcctattcaggcagatgttatcgaggtccgacnnnnnntaatcaaaaacacacaactataaataatagatcggatacgcatgaggct

SEQ ID NO: 6341 - DNA, 146 bp, Artificial Sequence
  Bisulfite Padlock Probe
  misc_feature 96, 97, 98, 99, 100, 101: n = A,T,C or G
gactggaagagcactgtttacctccccaaaatatccttaaaaactacgttggaggctcatcgttcctattcaggcagatgttatcgaggtccgacnnnnnntacaaacacccaactcctactaaccgatcggatacgcatgaggct

SEQ ID NO: 6342 - DNA, 146 bp, Artificial Sequence
  Bisulfite Padlock Probe
  misc_feature 96, 97, 98, 99, 100, 101: n = A,T,C or G
gactggaagagcactgtttacctccccgaaatatccttaaaaactacgttggaggctcatcgttcctattcaggcagatgttatcgaggtccgacnnnnnntacaaacgcccaactcctactaaccgatcggatacgcatgaggct

SEQ ID NO: 6343 - DNA, 146 bp, Artificial Sequence
  Bisulfite Padlock Probe
  misc_feature 96, 97, 98, 99, 100, 101: n = A,T,C or G
gactggaagagcactgtttacctcctaatccacctatcccccacaacgttggaggctcatcgttcctattcaggcagatgttatcgaggtccgacnnnnnnctttctcctcccaactcctacactcgatcggatacgcatgaggct

SEQ ID NO: 6344 - DNA, 146 bp, Artificial Sequence
  Bisulfite Padlock Probe
  misc_feature 94, 95, 96, 97, 98, 99: n = A,T,C or G
gactggaagagcactgtttaccttcctccaacaactatctactcagttggaggctcatcgttcctattcaggcagatgttatcgaggtccgacnnnnnntattcattaactacttataccaaaaccgatcggatacgcatgaggct

SEQ ID NO: 6345 - DNA, 146 bp, Artificial Sequence
  Bisulfite Padlock Probe
  misc_feature 94, 95, 96, 97, 98, 99: n = A,T,C or G
gactggaagagcactgtttaccttcctccaacaactatctactcagttggaggctcatcgttcctattcaggcagatgttatcgaggtccgacnnnnnntattcattaactacttataccgaaaccgatcggatacgcatgaggct

SEQ ID NO: 6346 - DNA, 146 bp, Artificial Sequence
  Bisulfite Padlock Probe
  misc_feature 94, 95, 96, 97, 98, 99: n = A,T,C or G
gactggaagagcactgtttaccttctacttctactaccaaaaaccgttggaggctcatcgttcctattcaggcagatgttatcgaggtccgacnnnnnnctaataaataccctaacacccccttccgatcggatacgcatgaggct

SEQ ID NO: 6347 - DNA, 146 bp, Artificial Sequence
  Bisulfite Padlock Probe
  misc_feature 94, 95, 96, 97, 98, 99: n = A,T,C or G
gactggaagagcactgtttaccttctacttctactaccgaaaaccgttggaggctcatcgttcctattcaggcagatgttatcgaggtccgacnnnnnnctaataaataccctaacgcccccttccgatcggatacgcatgaggct

SEQ ID NO: 6348 - DNA, 146 bp, Artificial Sequence
  Bisulfite Padlock Probe
  misc_feature 92, 93, 94, 95, 96, 97: n = A,T,C or G
gactggaagagcactgtttacgaaaaccgatactatcatccacgttggaggctcatcgttcctattcaggcagatgttatcgaggtccgacnnnnnntcccaaacataaaacccaactcccttatagatcggatacgcatgaggct

SEQ ID NO: 6349 - DNA, 146 bp, Artificial Sequence
  Bisulfite Padlock Probe
  misc_feature 92, 93, 94, 95, 96, 97: n = A,T,C or G
gactggaagagcactgtttacgaaaaccgatactatcgtccacgttggaggctcatcgttcctattcaggcagatgttatcgaggtccgacnnnnnntcccaaacataaaacccgactcccttatagatcggatacgcatgaggct

SEQ ID NO: 6350 - DNA, 146 bp, Artificial Sequence
  Bisulfite Padlock Probe
  misc_feature 92, 93, 94, 95, 96, 97: n = A,T,C or G
gactggaagagcactgtttacgaataaccgtcactcaaataacgttggaggctcatcgttcctattcaggcagatgttatcgaggtccgacnnnnnnactaaaatacccaataacattactaaaaagatcggatacgcatgaggct

SEQ ID NO: 6351 - DNA, 146 bp, Artificial Sequence
  Bisulfite Padlock Probe
  misc_feature 92, 93, 94, 95, 96, 97: n = A,T,C or G
gactggaagagcactgtttacgaataaccgtcactcgaataacgttggaggctcatcgttcctattcaggcagatgttatcgaggtccgacnnnnnnactaaaatacccgataacattactaaaaagatcggatacgcatgaggct

SEQ ID NO: 6352 - DNA, 146 bp, Artificial Sequence
  Bisulfite Padlock Probe
  misc_feature 95, 96, 97, 98, 99, 100: n = A,T,C or G
gactggaagagcactgtttacgaatctacaataaaatctaaaataagttggaggctcatcgttcctattcaggcagatgttatcgaggtccgacnnnnnnaaaaacccctaaaaacgccaaaaaccgatcggatacgcatgaggct

SEQ ID NO: 6353 - DNA, 146 bp, Artificial Sequence
  Bisulfite Padlock Probe
  misc_feature 95, 96, 97, 98, 99, 100: n = A,T,C or G
gactggaagagcactgtttacgaatctacgataaaatctaaaataagttggaggctcatcgttcctattcaggcagatgttatcgaggtccgacnnnnnnaaaaacccctaaaaacgccgaaaaccgatcggatacgcatgaggct

SEQ ID NO: 6354 - DNA, 146 bp, Artificial Sequence
  Bisulfite Padlock Probe
  misc_feature 92, 93, 94, 95, 96, 97: n = A,T,C or G
gactggaagagcactgtttacgacaccgaaaacgacccaaaacgttggaggctcatcgttcctattcaggcagatgttatcgaggtccgacnnnnnnccgccaaccatctaaactaaaatccttacgatcggatacgcatgaggct

SEQ ID NO: 6355 - DNA, 146 bp, Artificial Sequence
  Bisulfite Padlock Probe
  misc_feature 92, 93, 94, 95, 96, 97: n = A,T,C or G
gactggaagagcactgtttacgacaccgaaaacgacccgaaacgttggaggctcatcgttcctattcaggcagatgttatcgaggtccgacnnnnnnccgccaaccgtctaaactaaaatccttacgatcggatacgcatgaggct

SEQ ID NO: 6356 - DNA, 146 bp, Artificial Sequence
  Bisulfite Padlock Probe
  misc_feature 92, 93, 94, 95, 96, 97: n = A,T,C or G
gactggaagagcactgtttacgacacgcaaaaccacctctaccgttggaggctcatcgttcctattcaggcagatgttatcgaggtccgacnnnnnnacccaaattccccaacttacctaaccaaagatcggatacgcatgaggct

SEQ ID NO: 6357 - DNA, 146 bp, Artificial Sequence
  Bisulfite Padlock Probe
  misc_feature 92, 93, 94, 95, 96, 97: n = A,T,C or G
gactggaagagcactgtttacgacacgcaaaaccgcctctaccgttggaggctcatcgttcctattcaggcagatgttatcgaggtccgacnnnnnnacccaaattccccaacttacctaaccaaagatcggatacgcatgaggct

SEQ ID NO: 6358 - DNA, 146 bp, Artificial Sequence
  Bisulfite Padlock Probe
  misc_feature 92, 93, 94, 95, 96, 97: n = A,T,C or G
gactggaagagcactgtttacgacgttcacccgcaaacaaatcgttggaggctcatcgttcctattcaggcagatgttatcgaggtccgacnnnnnnattaatcctacaaccactcatacactattgatcggatacgcatgaggct

SEQ ID NO: 6359 - DNA, 146 bp, Artificial Sequence
  Bisulfite Padlock Probe
  misc_feature 92, 93, 94, 95, 96, 97: n = A,T,C or G
gactggaagagcactgtttacgacgttcacccgcgaacaaatcgttggaggctcatcgttcctattcaggcagatgttatcgaggtccgacnnnnnnattaatcctacaaccactcatacgctattgatcggatacgcatgaggct

SEQ ID NO: 6360 - DNA, 146 bp, Artificial Sequence
  Bisulfite Padlock Probe
  misc_feature 94, 95, 96, 97, 98, 99: n = A,T,C or G
gactggaagagcactgtttacgactactacccctacttataaatagttggaggctcatcgttcctattcaggcagatgttatcgaggtccgacnnnnnncccccgaaaacgaaacccaaaccaatcgatcggatacgcatgaggct

SEQ ID NO: 6361 - DNA, 146 bp, Artificial Sequence
  Bisulfite Padlock Probe
  misc_feature 93, 94, 95, 96, 97, 98: n = A,T,C or G
gactggaagagcactgtttacgataaattcctcacccttaaaaagttggaggctcatcgttcctattcaggcagatgttatcgaggtccgacnnnnnncctaaaaacctaaaaccaccccaccttcgatcggatacgcatgaggct

SEQ ID NO: 6362 - DNA, 146 bp, Artificial Sequence
  Bisulfite Padlock Probe
  misc_feature 93, 94, 95, 96, 97, 98: n = A,T,C or G
gactggaagagcactgtttacgataaattcctcgcccttaaaaagttggaggctcatcgttcctattcaggcagatgttatcgaggtccgacnnnnnncctaaaaacctaaaaccaccccgccttcgatcggatacgcatgaggct

SEQ ID NO: 6363 - DNA, 146 bp, Artificial Sequence
  Bisulfite Padlock Probe
  misc_feature 94, 95, 96, 97, 98, 99: n = A,T,C or G
gactggaagagcactgtttacgcctcctaccaataccacttcttcgttggaggctcatcgttcctattcaggcagatgttatcgaggtccgacnnnnnnaaaaactcccaaacaaaaataaaaaccgatcggatacgcatgaggct

SEQ ID NO: 6364 - DNA, 146 bp, Artificial Sequence
  Bisulfite Padlock Probe
  misc_feature 94, 95, 96, 97, 98, 99: n = A,T,C or G
gactggaagagcactgtttacgcctcctaccaataccgcttcttcgttggaggctcatcgttcctattcaggcagatgttatcgaggtccgacnnnnnnaaaaactcccaaacaaaaataaaaaccgatcggatacgcatgaggct

SEQ ID NO: 6365 - DNA, 146 bp, Artificial Sequence
  Bisulfite Padlock Probe
  misc_feature 92, 93, 94, 95, 96, 97: n = A,T,C or G
gactggaagagcactgtttacgcgaaaaacgcataaaccgcaagttggaggctcatcgttcctattcaggcagatgttatcgaggtccgacnnnnnnccacacctccccctcctctaaaccttaaagatcggatacgcatgaggct

SEQ ID NO: 6366 - DNA, 146 bp, Artificial Sequence
  Bisulfite Padlock Probe
  misc_feature 92, 93, 94, 95, 96, 97: n = A,T,C or G
gactggaagagcactgtttacgcgaaaaacgcataaaccgcgagttggaggctcatcgttcctattcaggcagatgttatcgaggtccgacnnnnnnccacacctccccctcctctaaaccttaaagatcggatacgcatgaggct

SEQ ID NO: 6367 - DNA, 146 bp, Artificial Sequence
  Bisulfite Padlock Probe
  misc_feature 92, 93, 94, 95, 96, 97: n = A,T,C or G
gactggaagagcactgtttacgcgacgaccgcttaaccataacgttggaggctcatcgttcctattcaggcagatgttatcgaggtccgacnnnnnnaaaaactacgaccaaacactaatccactagatcggatacgcatgaggct

SEQ ID NO: 6368 - DNA, 146 bp, Artificial Sequence
  Bisulfite Padlock Probe
  misc_feature 92, 93, 94, 95, 96, 97: n = A,T,C or G
gactggaagagcactgtttacgcgacgaccgcttaaccgtaacgttggaggctcatcgttcctattcaggcagatgttatcgaggtccgacnnnnnnaaaaactacgaccaaacactaatccgctagatcggatacgcatgaggct

SEQ ID NO: 6369 - DNA, 146 bp, Artificial Sequence
  Bisulfite Padlock Probe
  misc_feature 92, 93, 94, 95, 96, 97: n = A,T,C or G
gactggaagagcactgtttacgctcgctcaacacctactcaacgttggaggctcatcgttcctattcaggcagatgttatcgaggtccgacnnnnnntaaaaccgaacgaaaacctaacaaacaaagatcggatacgcatgaggct

SEQ ID NO: 6370 - DNA, 146 bp, Artificial Sequence
  Bisulfite Padlock Probe
  misc_feature 92, 93, 94, 95, 96, 97: n = A,T,C or G
gactggaagagcactgtttacgctcgctcaacacctactcgacgttggaggctcatcgttcctattcaggcagatgttatcgaggtccgacnnnnnntaaaaccgaacgaaaacctaacgaacaaagatcggatacgcatgaggct

SEQ ID NO: 6371 - DNA, 146 bp, Artificial Sequence
  Bisulfite Padlock Probe
  misc_feature 92, 93, 94, 95, 96, 97: n = A,T,C or G
gactggaagagcactgtttactaaaccgcaaacgccaaaaccagttggaggctcatcgttcctattcaggcagatgttatcgaggtccgacnnnnnntctccaccattaaacccaaataccaaatcgatcggatacgcatgaggct

SEQ ID NO: 6372 - DNA, 146 bp, Artificial Sequence
  Bisulfite Padlock Probe
  misc_feature 92, 93, 94, 95, 96, 97: n = A,T,C or G
gactggaagagcactgtttactaaaccgcaaacgccaaaaccggttggaggctcatcgttcctattcaggcagatgttatcgaggtccgacnnnnnntctccaccgttaaacccaaataccaaatcgatcggatacgcatgaggct

SEQ ID NO: 6373 - DNA, 146 bp, Artificial Sequence
  Bisulfite Padlock Probe
  misc_feature 92, 93, 94, 95, 96, 97: n = A,T,C or G
gactggaagagcactgtttactaaataaaaacgacaacccaccgttggaggctcatcgttcctattcaggcagatgttatcgaggtccgacnnnnnnaaaccactaccgtcaccacttttaccaaagatcggatacgcatgaggct

SEQ ID NO: 6374 - DNA, 146 bp, Artificial Sequence
  Bisulfite Padlock Probe
  misc_feature 92, 93, 94, 95, 96, 97: n = A,T,C or G
gactggaagagcactgtttactaaataaaaacgacaacccgccgttggaggctcatcgttcctattcaggcagatgttatcgaggtccgacnnnnnnaaaccactaccgtcaccgcttttaccaaagatcggatacgcatgaggct

SEQ ID NO: 6375 - DNA, 146 bp, Artificial Sequence
  Bisulfite Padlock Probe
  misc_feature 93, 94, 95, 96, 97, 98: n = A,T,C or G
gactggaagagcactgtttactaaataaaccaataaaatataacgttggaggctcatcgttcctattcaggcagatgttatcgaggtccgacnnnnnncgaatcaataaaacgaaattcaaaattcgatcggatacgcatgaggct

SEQ ID NO: 6376 - DNA, 146 bp, Artificial Sequence
  Bisulfite Padlock Probe
  misc_feature 93, 94, 95, 96, 97, 98: n = A,T,C or G
gactggaagagcactgtttactaaataaaccgataaaatataacgttggaggctcatcgttcctattcaggcagatgttatcgaggtccgacnnnnnncgaatcaataaaacgaaattcgaaattcgatcggatacgcatgaggct

SEQ ID NO: 6377 - DNA, 146 bp, Artificial Sequence
  Bisulfite Padlock Probe
  misc_feature 96, 97, 98, 99, 100, 101: n = A,T,C or G
gactggaagagcactgtttactaatcacccaccaattcctccaaaacgttggaggctcatcgttcctattcaggcagatgttatcgaggtccgacnnnnnntttataactaaacactaaaaacctcgatcggatacgcatgaggct

SEQ ID NO: 6378 - DNA, 146 bp, Artificial Sequence
  Bisulfite Padlock Probe
  misc_feature 96, 97, 98, 99, 100, 101: n = A,T,C or G
gactggaagagcactgtttactaatcacccgccaattcctccaaaacgttggaggctcatcgttcctattcaggcagatgttatcgaggtccgacnnnnnntttataactaaacgctaaaaacctcgatcggatacgcatgaggct

SEQ ID NO: 6379 - DNA, 146 bp, Artificial Sequence
  Bisulfite Padlock Probe
  misc_feature 92, 93, 94, 95, 96, 97: n = A,T,C or G
gactggaagagcactgtttactaattttatcactcatcaactagttggaggctcatcgttcctattcaggcagatgttatcgaggtccgacnnnnnnacacacacacacacacacacacacacatagatcggatacgcatgaggct

SEQ ID NO: 6380 - DNA, 146 bp, Artificial Sequence
  Bisulfite Padlock Probe
  misc_feature 92, 93, 94, 95, 96, 97: n = A,T,C or G
gactggaagagcactgtttactaattttatcgctcatcaactagttggaggctcatcgttcctattcaggcagatgttatcgaggtccgacnnnnnnacacacacacacacacacacacacacatagatcggatacgcatgaggct

SEQ ID NO: 6381 - DNA, 146 bp, Artificial Sequence
  Bisulfite Padlock Probe
  misc_feature 95, 96, 97, 98, 99, 100: n = A,T,C or G
gactggaagagcactgtttactacctaataataactctatacaatcgttggaggctcatcgttcctattcaggcagatgttatcgaggtccgacnnnnnnaaactcaattatactactattctctcgatcggatacgcatgaggct

SEQ ID NO: 6382 - DNA, 146 bp, Artificial Sequence
  Bisulfite Padlock Probe
  misc_feature 92, 93, 94, 95, 96, 97: n = A,T,C or G
gactggaagagcactgtttactacgaaccgaaataaccaacccgttggaggctcatcgttcctattcaggcagatgttatcgaggtccgacnnnnnnataaatatccccaaactactaataaattcgatcggatacgcatgaggct

SEQ ID NO: 6383 - DNA, 146 bp, Artificial Sequence
  Bisulfite Padlock Probe
  misc_feature 92, 93, 94, 95, 96, 97: n = A,T,C or G
gactggaagagcactgtttactacgaaccgaaataaccgacccgttggaggctcatcgttcctattcaggcagatgttatcgaggtccgacnnnnnnataaatatccccgaactactaataaattcgatcggatacgcatgaggct

SEQ ID NO: 6384 - DNA, 146 bp, Artificial Sequence
  Bisulfite Padlock Probe
  misc_feature 93, 94, 95, 96, 97, 98: n = A,T,C or G
gactggaagagcactgtttactacgcctatttacaataaaaaccgttggaggctcatcgttcctattcaggcagatgttatcgaggtccgacnnnnnnctaaaacaaacgctaaacttcatacaaagatcggatacgcatgaggct

SEQ ID NO: 6385 - DNA, 146 bp, Artificial Sequence
  Bisulfite Padlock Probe
  misc_feature 93, 94, 95, 96, 97, 98: n = A,T,C or G
gactggaagagcactgtttactacgcctatttacgataaaaaccgttggaggctcatcgttcctattcaggcagatgttatcgaggtccgacnnnnnnctaaaacaaacgctaaacttcgtacaaagatcggatacgcatgaggct

SEQ ID NO: 6386 - DNA, 146 bp, Artificial Sequence
  Bisulfite Padlock Probe
  misc_feature 92, 93, 94, 95, 96, 97: n = A,T,C or G
gactggaagagcactgtttactacgcgcccacacattctctacgttggaggctcatcgttcctattcaggcagatgttatcgaggtccgacnnnnnnaacccctcataattaacaccaaaacaatcgatcggatacgcatgaggct

SEQ ID NO: 6387 - DNA, 146 bp, Artificial Sequence
  Bisulfite Padlock Probe
  misc_feature 92, 93, 94, 95, 96, 97: n = A,T,C or G
gactggaagagcactgtttactacgcgcccacacgttctctacgttggaggctcatcgttcctattcaggcagatgttatcgaggtccgacnnnnnnaacccctcataattaacaccgaaacaatcgatcggatacgcatgaggct

SEQ ID NO: 6388 - DNA, 146 bp, Artificial Sequence
  Bisulfite Padlock Probe
  misc_feature 93, 94, 95, 96, 97, 98: n = A,T,C or G
gactggaagagcactgtttactactactactactactactaaaagttggaggctcatcgttcctattcaggcagatgttatcgaggtccgacnnnnnnctaaaacaaaaccctctcccatcccaccgatcggatacgcatgaggct

SEQ ID NO: 6389 - DNA, 146 bp, Artificial Sequence
  Bisulfite Padlock Probe
  misc_feature 93, 94, 95, 96, 97, 98: n = A,T,C or G
gactggaagagcactgtttactactactactactactactaaaagttggaggctcatcgttcctattcaggcagatgttatcgaggtccgacnnnnnnctaaaacgaaaccctctcccatcccaccgatcggatacgcatgaggct

SEQ ID NO: 6390 - DNA, 146 bp, Artificial Sequence
  Bisulfite Padlock Probe
  misc_feature 95, 96, 97, 98, 99, 100: n = A,T,C or G
gactggaagagcactgtttactataaatcctcaaaaatcaaattcagttggaggctcatcgttcctattcaggcagatgttatcgaggtccgacnnnnnnacaaaccctactaccaaccctacttcgatcggatacgcatgaggct

SEQ ID NO: 6391 - DNA, 146 bp, Artificial Sequence
  Bisulfite Padlock Probe
  misc_feature 94, 95, 96, 97, 98, 99: n = A,T,C or G
gactggaagagcactgtttactatactataaacaaaactccaaaagttggaggctcatcgttcctattcaggcagatgttatcgaggtccgacnnnnnnactctaataaacataccactaatattcgatcggatacgcatgaggct

SEQ ID NO: 6392 - DNA, 146 bp, Artificial Sequence
  Bisulfite Padlock Probe
  misc_feature 94, 95, 96, 97, 98, 99: n = A,T,C or G
gactggaagagcactgtttactatactataaacaaaactccgaaagttggaggctcatcgttcctattcaggcagatgttatcgaggtccgacnnnnnnactctaataaacataccgctaatattcgatcggatacgcatgaggct

SEQ ID NO: 6393 - DNA, 146 bp, Artificial Sequence
  Bisulfite Padlock Probe
  misc_feature 95, 96, 97, 98, 99, 100: n = A,T,C or G
gactggaagagcactgtttactcaatctctaatatttataaatatcgttggaggctcatcgttcctattcaggcagatgttatcgaggtccgacnnnnnnaaaccatccctaacgcattctcaatcgatcggatacgcatgaggct

SEQ ID NO: 6394 - DNA, 146 bp, Artificial Sequence
  Bisulfite Padlock Probe
  misc_feature 95, 96, 97, 98, 99, 100: n = A,T,C or G
gactggaagagcactgtttactcaatctctaatatttataaatatcgttggaggctcatcgttcctattcaggcagatgttatcgaggtccgacnnnnnnaaaccatccctaacgcgttctcaatcgatcggatacgcatgaggct

SEQ ID NO: 6395 - DNA, 146 bp, Artificial Sequence
  Bisulfite Padlock Probe
  misc_feature 92, 93, 94, 95, 96, 97: n = A,T,C or G
gactggaagagcactgtttactcacatatacattttcttcatcgttggaggctcatcgttcctattcaggcagatgttatcgaggtccgacnnnnnnaaccaaaaactaaaaactaaaccaaaatcgatcggatacgcatgaggct

SEQ ID NO: 6396 - DNA, 146 bp, Artificial Sequence
  Bisulfite Padlock Probe
  misc_feature 92, 93, 94, 95, 96, 97: n = A,T,C or G
gactggaagagcactgtttactcacatatacattttcttcatcgttggaggctcatcgttcctattcaggcagatgttatcgaggtccgacnnnnnnaaccgaaaactaaaaactaaaccaaaatcgatcggatacgcatgaggct

SEQ ID NO: 6397 - DNA, 146 bp, Artificial Sequence
  Bisulfite Padlock Probe
  misc_feature 94, 95, 96, 97, 98, 99: n = A,T,C or G
gactggaagagcactgtttactcacctaactcgctccaaataaacgttggaggctcatcgttcctattcaggcagatgttatcgaggtccgacnnnnnnaaaaccaaatatcaaaaaattccaaccgatcggatacgcatgaggct

SEQ ID NO: 6398 - DNA, 146 bp, Artificial Sequence
  Bisulfite Padlock Probe
  misc_feature 94, 95, 96, 97, 98, 99: n = A,T,C or G
gactggaagagcactgtttactcacctaactcgctccgaataaacgttggaggctcatcgttcctattcaggcagatgttatcgaggtccgacnnnnnnaaaaccaaatatcgaaaaattccaaccgatcggatacgcatgaggct

SEQ ID NO: 6399 - DNA, 146 bp, Artificial Sequence
  Bisulfite Padlock Probe
  misc_feature 92, 93, 94, 95, 96, 97: n = A,T,C or G
gactggaagagcactgtttactccctaaaaacctccaaacctagttggaggctcatcgttcctattcaggcagatgttatcgaggtccgacnnnnnnccttatctccaacttctctactaaaacccgatcggatacgcatgaggct

SEQ ID NO: 6400 - DNA, 146 bp, Artificial Sequence
  Bisulfite Padlock Probe
  misc_feature 92, 93, 94, 95, 96, 97: n = A,T,C or G
gactggaagagcactgtttactcgaccgacgccaaactaaatcgttggaggctcatcgttcctattcaggcagatgttatcgaggtccgacnnnnnnaaaaactcctaaaccaaattctctaacttgatcggatacgcatgaggct

SEQ ID NO: 6401 - DNA, 146 bp, Artificial Sequence
  Bisulfite Padlock Probe
  misc_feature 92, 93, 94, 95, 96, 97: n = A,T,C or G
gactggaagagcactgtttactcgaccgacgccgaactaaatcgttggaggctcatcgttcctattcaggcagatgttatcgaggtccgacnnnnnnaaaaactcctaaaccgaattctctaacttgatcggatacgcatgaggct

SEQ ID NO: 6402 - DNA, 146 bp, Artificial Sequence
  Bisulfite Padlock Probe
  misc_feature 92, 93, 94, 95, 96, 97: n = A,T,C or G
gactggaagagcactgtttactctacctacaccctcattaaacgttggaggctcatcgttcctattcaggcagatgttatcgaggtccgacnnnnnntaattacactataatttcttcaatccccagatcggatacgcatgaggct

SEQ ID NO: 6403 - DNA, 146 bp, Artificial Sequence
  Bisulfite Padlock Probe
  misc_feature 92, 93, 94, 95, 96, 97: n = A,T,C or G
gactggaagagcactgtttactctacctacgccctcattaaacgttggaggctcatcgttcctattcaggcagatgttatcgaggtccgacnnnnnntaattacactataatttcttcaatccccagatcggatacgcatgaggct

SEQ ID NO: 6404 - DNA, 146 bp, Artificial Sequence
  Bisulfite Padlock Probe
  misc_feature 93, 94, 95, 96, 97, 98: n = A,T,C or G
gactggaagagcactgtttacttaaaaacacccatccaaaccacgttggaggctcatcgttcctattcaggcagatgttatcgaggtccgacnnnnnncccctaaaaactcgaaccaactccactcgatcggatacgcatgaggct

SEQ ID NO: 6405 - DNA, 146 bp, Artificial Sequence
  Bisulfite Padlock Probe
  misc_feature 93, 94, 95, 96, 97, 98: n = A,T,C or G
gactggaagagcactgtttacttaaaaacacccatccaaaccacgttggaggctcatcgttcctattcaggcagatgttatcgaggtccgacnnnnnncccctaaaaactcgaaccgactccactcgatcggatacgcatgaggct

SEQ ID NO: 6406 - DNA, 146 bp, Artificial Sequence
  Bisulfite Padlock Probe
  misc_feature 96, 97, 98, 99, 100, 101: n = A,T,C or G
gactggaagagcactgtttacttccatccaaccactaaacaccttccgttggaggctcatcgttcctattcaggcagatgttatcgaggtccgacnnnnnncttctacacctacataataacacacgatcggatacgcatgaggct

SEQ ID NO: 6407 - DNA, 146 bp, Artificial Sequence
  Bisulfite Padlock Probe
  misc_feature 96, 97, 98, 99, 100, 101: n = A,T,C or G
gactggaagagcactgtttacttccatccgaccactaaacaccttccgttggaggctcatcgttcctattcaggcagatgttatcgaggtccgacnnnnnncttctacacctacataataacgcacgatcggatacgcatgaggct

SEQ ID NO: 6408 - DNA, 146 bp, Artificial Sequence
  Bisulfite Padlock Probe
  misc_feature 93, 94, 95, 96, 97, 98: n = A,T,C or G
gactggaagagcactgtttacttccttaactaaaactaaacttcgttggaggctcatcgttcctattcaggcagatgttatcgaggtccgacnnnnnnaccaaaaccacaacaactacctaaaatcgatcggatacgcatgaggct

SEQ ID NO: 6409 - DNA, 146 bp, Artificial Sequence
  Bisulfite Padlock Probe
  misc_feature 93, 94, 95, 96, 97, 98: n = A,T,C or G
gactggaagagcactgtttacttccttaactaaaactaaacttcgttggaggctcatcgttcctattcaggcagatgttatcgaggtccgacnnnnnnaccgaaaccacaacaactacctaaaatcgatcggatacgcatgaggct

SEQ ID NO: 6410 - DNA, 146 bp, Artificial Sequence
  Bisulfite Padlock Probe
  misc_feature 94, 95, 96, 97, 98, 99: n = A,T,C or G
gactggaagagcactgtttacttcttcttaaccgacaccatctccgttggaggctcatcgttcctattcaggcagatgttatcgaggtccgacnnnnnnccgcacgaactaaccaacaccaaattcgatcggatacgcatgaggct

SEQ ID NO: 6411 - DNA, 146 bp, Artificial Sequence
  Bisulfite Padlock Probe
  misc_feature 94, 95, 96, 97, 98, 99: n = A,T,C or G
gactggaagagcactgtttacttcttcttaaccgacgccatctccgttggaggctcatcgttcctattcaggcagatgttatcgaggtccgacnnnnnnccgcacgaactaaccaacgccaaattcgatcggatacgcatgaggct

SEQ ID NO: 6412 - DNA, 146 bp, Artificial Sequence
  Bisulfite Padlock Probe
  misc_feature 96, 97, 98, 99, 100, 101: n = A,T,C or G
gactggaagagcactgtttactttccatccctataccacctcctcctgttggaggctcatcgttcctattcaggcagatgttatcgaggtccgacnnnnnnatctaccccctatcacaataaaaacgatcggatacgcatgaggct

SEQ ID NO: 6413 - DNA, 146 bp, Artificial Sequence
  Bisulfite Padlock Probe
  misc_feature 96, 97, 98, 99, 100, 101: n = A,T,C or G
gactggaagagcactgtttactttccatccctataccacctcctcctgttggaggctcatcgttcctattcaggcagatgttatcgaggtccgacnnnnnnatctaccccctatcgcaataaaaacgatcggatacgcatgaggct

SEQ ID NO: 6414 - DNA, 146 bp, Artificial Sequence
  Bisulfite Padlock Probe
  misc_feature 95, 96, 97, 98, 99, 100: n = A,T,C or G
gactggaagagcactgtttacttttaatcaacaatattaaattttagttggaggctcatcgttcctattcaggcagatgttatcgaggtccgacnnnnnncgctccccaactctctaaaaaccctcgatcggatacgcatgaggct

SEQ ID NO: 6415 - DNA, 146 bp, Artificial Sequence
  Bisulfite Padlock Probe
  misc_feature 95, 96, 97, 98, 99, 100: n = A,T,C or G
gactggaagagcactgtttacttttaatcaacaatattaaattttagttggaggctcatcgttcctattcaggcagatgttatcgaggtccgacnnnnnncgctccccgactctctaaaaaccctcgatcggatacgcatgaggct

SEQ ID NO: 6416 - DNA, 146 bp, Artificial Sequence
  Bisulfite Padlock Probe
  misc_feature 92, 93, 94, 95, 96, 97: n = A,T,C or G
gactggaagagcactgtttataaaaataaaaacaacataaaaagttggaggctcatcgttcctattcaggcagatgttatcgaggtccgacnnnnnnaaaaataaaaatactaacacacaaaactagatcggatacgcatgaggct

SEQ ID NO: 6417 - DNA, 146 bp, Artificial Sequence
  Bisulfite Padlock Probe
  misc_feature 92, 93, 94, 95, 96, 97: n = A,T,C or G
gactggaagagcactgtttataaaaataaaaacaacgtaaaaagttggaggctcatcgttcctattcaggcagatgttatcgaggtccgacnnnnnnaaaaataaaaatactaacacacaaaactagatcggatacgcatgaggct

SEQ ID NO: 6418 - DNA, 146 bp, Artificial Sequence
  Bisulfite Padlock Probe
  misc_feature 94, 95, 96, 97, 98, 99: n = A,T,C or G
gactggaagagcactgtttataaaactaaatccctaaaaataaaagttggaggctcatcgttcctattcaggcagatgttatcgaggtccgacnnnnnnacctctctacctacaaccctaaaccccgatcggatacgcatgaggct

SEQ ID NO: 6419 - DNA, 146 bp, Artificial Sequence
  Bisulfite Padlock Probe
  misc_feature 92, 93, 94, 95, 96, 97: n = A,T,C or G
gactggaagagcactgtttataaaattaaaacactctctaatcgttggaggctcatcgttcctattcaggcagatgttatcgaggtccgacnnnnnnaaaaccctactaacgaaacaaacctaaccgatcggatacgcatgaggct

SEQ ID NO: 6420 - DNA, 146 bp, Artificial Sequence
  Bisulfite Padlock Probe
  misc_feature 92, 93, 94, 95, 96, 97: n = A,T,C or G
gactggaagagcactgtttataaaattaaaacactctctaatcgttggaggctcatcgttcctattcaggcagatgttatcgaggtccgacnnnnnnaaaaccctactaacgaaacgaacctaaccgatcggatacgcatgaggct

SEQ ID NO: 6421 - DNA, 146 bp, Artificial Sequence
  Bisulfite Padlock Probe
  misc_feature 95, 96, 97, 98, 99, 100: n = A,T,C or G
gactggaagagcactgtttataaacgtacgactcgacctcaaaatagttggaggctcatcgttcctattcaggcagatgttatcgaggtccgacnnnnnnaccgaaccaaactaaactaaaatcccgatcggatacgcatgaggct

SEQ ID NO: 6422 - DNA, 146 bp, Artificial Sequence
  Bisulfite Padlock Probe
  misc_feature 95, 96, 97, 98, 99, 100: n = A,T,C or G
gactggaagagcactgtttataaacgtacgactcgacctcgaaatagttggaggctcatcgttcctattcaggcagatgttatcgaggtccgacnnnnnnaccgaaccgaactaaactaaaatcccgatcggatacgcatgaggct

SEQ ID NO: 6423 - DNA, 146 bp, Artificial Sequence
  Bisulfite Padlock Probe
  misc_feature 96, 97, 98, 99, 100, 101: n = A,T,C or G
gactggaagagcactgtttataaatacacctcactcacatataaatcgttggaggctcatcgttcctattcaggcagatgttatcgaggtccgacnnnnnnaaaccaattaaaaactctactccccgatcggatacgcatgaggct

SEQ ID NO: 6424 - DNA, 146 bp, Artificial Sequence
  Bisulfite Padlock Probe
  misc_feature 96, 97, 98, 99, 100, 101: n = A,T,C or G
gactggaagagcactgtttataaatacacctcactcacatataaatcgttggaggctcatcgttcctattcaggcagatgttatcgaggtccgacnnnnnnaaaccgattaaaaactctactccccgatcggatacgcatgaggct

SEQ ID NO: 6425 - DNA, 146 bp, Artificial Sequence
  Bisulfite Padlock Probe
  misc_feature 92, 93, 94, 95, 96, 97: n = A,T,C or G
gactggaagagcactgtttataacaaaaactaaaacaaataacgttggaggctcatcgttcctattcaggcagatgttatcgaggtccgacnnnnnncccctaccaaataactaacacaataataagatcggatacgcatgaggct

SEQ ID NO: 6426 - DNA, 146 bp, Artificial Sequence
  Bisulfite Padlock Probe
  misc_feature 92, 93, 94, 95, 96, 97: n = A,T,C or G
gactggaagagcactgtttataacaaaaactaaaacgaataacgttggaggctcatcgttcctattcaggcagatgttatcgaggtccgacnnnnnncccctaccaaataactaacgcaataataagatcggatacgcatgaggct

SEQ ID NO: 6427 - DNA, 146 bp, Artificial Sequence
  Bisulfite Padlock Probe
  misc_feature 92, 93, 94, 95, 96, 97: n = A,T,C or G
gactggaagagcactgtttataacaaccgctaaaaccgcgcacgttggaggctcatcgttcctattcaggcagatgttatcgaggtccgacnnnnnntaatccaaaccatactattctctacatccgatcggatacgcatgaggct

SEQ ID NO: 6428 - DNA, 146 bp, Artificial Sequence
  Bisulfite Padlock Probe
  misc_feature 92, 93, 94, 95, 96, 97: n = A,T,C or G
gactggaagagcactgtttataacaaccgctaaaaccgcgcgcgttggaggctcatcgttcctattcaggcagatgttatcgaggtccgacnnnnnntaatccaaaccatactattctctacgtccgatcggatacgcatgaggct

SEQ ID NO: 6429 - DNA, 146 bp, Artificial Sequence
  Bisulfite Padlock Probe
  misc_feature 96, 97, 98, 99, 100, 101: n = A,T,C or G
gactggaagagcactgtttataaccgaaaacaaacccaaaaaacttcgttggaggctcatcgttcctattcaggcagatgttatcgaggtccgacnnnnnngataacccccgcgctacactataccgatcggatacgcatgaggct

SEQ ID NO: 6430 - DNA, 146 bp, Artificial Sequence
  Bisulfite Padlock Probe
  misc_feature 96, 97, 98, 99, 100, 101: n = A,T,C or G
gactggaagagcactgtttataaccgaaaacaaacccgaaaaacttcgttggaggctcatcgttcctattcaggcagatgttatcgaggtccgacnnnnnngataacccccgcgctacgctataccgatcggatacgcatgaggct

SEQ ID NO: 6431 - DNA, 146 bp, Artificial Sequence
  Bisulfite Padlock Probe
  misc_feature 93, 94, 95, 96, 97, 98: n = A,T,C or G
gactggaagagcactgtttataacctaaaaactacacttaattcgttggaggctcatcgttcctattcaggcagatgttatcgaggtccgacnnnnnntctcaactttccctaaatctcaactttcgatcggatacgcatgaggct

SEQ ID NO: 6432 - DNA, 146 bp, Artificial Sequence
  Bisulfite Padlock Probe
  misc_feature 93, 94, 95, 96, 97, 98: n = A,T,C or G
gactggaagagcactgtttataacgcccgccgaaatacaaatccgttggaggctcatcgttcctattcaggcagatgttatcgaggtccgacnnnnnnaaaccgcctatcgcatcccaaataatctgatcggatacgcatgaggct

SEQ ID NO: 6433 - DNA, 146 bp, Artificial Sequence
  Bisulfite Padlock Probe
  misc_feature 93, 94, 95, 96, 97, 98: n = A,T,C or G
gactggaagagcactgtttataacgcccgccgaaatacgaatccgttggaggctcatcgttcctattcaggcagatgttatcgaggtccgacnnnnnnaaaccgcctatcgcgtcccaaataatctgatcggatacgcatgaggct

SEQ ID NO: 6434 - DNA, 146 bp, Artificial Sequence
  Bisulfite Padlock Probe
  misc_feature 93, 94, 95, 96, 97, 98: n = A,T,C or G
gactggaagagcactgtttataactcatcgacttcaacaaaaccgttggaggctcatcgttcctattcaggcagatgttatcgaggtccgacnnnnnnaaacaccctaaaaatatccaaattcttcgatcggatacgcatgaggct

SEQ ID NO: 6435 - DNA, 146 bp, Artificial Sequence
  Bisulfite Padlock Probe
  misc_feature 93, 94, 95, 96, 97, 98: n = A,T,C or G
gactggaagagcactgtttataactcatcgacttcgacaaaaccgttggaggctcatcgttcctattcaggcagatgttatcgaggtccgacnnnnnnaaacaccctaaaaatatccgaattcttcgatcggatacgcatgaggct

SEQ ID NO: 6436 - DNA, 146 bp, Artificial Sequence
  Bisulfite Padlock Probe
  misc_feature 95, 96, 97, 98, 99, 100: n = A,T,C or G
gactggaagagcactgtttatacaaccccgatccgaacaacctaaagttggaggctcatcgttcctattcaggcagatgttatcgaggtccgacnnnnnncgaaaacctcgacgcacccaaaaatcgatcggatacgcatgaggct

SEQ ID NO: 6437 - DNA, 146 bp, Artificial Sequence
  Bisulfite Padlock Probe
  misc_feature 95, 96, 97, 98, 99, 100: n = A,T,C or G
gactggaagagcactgtttatacaaccccgatccgaacgacctaaagttggaggctcatcgttcctattcaggcagatgttatcgaggtccgacnnnnnncgaaaacctcgacgcacccgaaaatcgatcggatacgcatgaggct

SEQ ID NO: 6438 - DNA, 146 bp, Artificial Sequence
  Bisulfite Padlock Probe
  misc_feature 92, 93, 94, 95, 96, 97: n = A,T,C or G
gactggaagagcactgtttatacactataaaataactactaccgttggaggctcatcgttcctattcaggcagatgttatcgaggtccgacnnnnnnccaacacccttctattcctaatataactagatcggatacgcatgaggct

SEQ ID NO: 6439 - DNA, 146 bp, Artificial Sequence
  Bisulfite Padlock Probe
  misc_feature 96, 97, 98, 99, 100, 101: n = A,T,C or G
gactggaagagcactgtttataccaaaaacccctctcctactattacgttggaggctcatcgttcctattcaggcagatgttatcgaggtccgacnnnnnnatctaaactctaaccaatccaaaaagatcggatacgcatgaggct

SEQ ID NO: 6440 - DNA, 146 bp, Artificial Sequence
  Bisulfite Padlock Probe
  misc_feature 96, 97, 98, 99, 100, 101: n = A,T,C or G
gactggaagagcactgtttataccaaaaacccctctcctactattacgttggaggctcatcgttcctattcaggcagatgttatcgaggtccgacnnnnnnatctaaactctaaccaatccgaaaagatcggatacgcatgaggct

SEQ ID NO: 6441 - DNA, 146 bp, Artificial Sequence
  Bisulfite Padlock Probe
  misc_feature 92, 93, 94, 95, 96, 97: n = A,T,C or G
gactggaagagcactgtttataccaacaactaaataataaaaagttggaggctcatcgttcctattcaggcagatgttatcgaggtccgacnnnnnntcaaaatactattaatattaaacttaatcgatcggatacgcatgaggct

SEQ ID NO: 6442 - DNA, 146 bp, Artificial Sequence
  Bisulfite Padlock Probe
  misc_feature 94, 95, 96, 97, 98, 99: n = A,T,C or G
gactggaagagcactgtttatacccgcaacccgaatcttctcaacgttggaggctcatcgttcctattcaggcagatgttatcgaggtccgacnnnnnntaaaaacccaaaaacccccaaaaactcgatcggatacgcatgaggct

SEQ ID NO: 6443 - DNA, 146 bp, Artificial Sequence
  Bisulfite Padlock Probe
  misc_feature 94, 95, 96, 97, 98, 99: n = A,T,C or G
gactggaagagcactgtttatacccgcaacccgaatcttctcgacgttggaggctcatcgttcctattcaggcagatgttatcgaggtccgacnnnnnntaaaaacccaaaaacccccgaaaactcgatcggatacgcatgaggct

SEQ ID NO: 6444 - DNA, 146 bp, Artificial Sequence
  Bisulfite Padlock Probe
  misc_feature 92, 93, 94, 95, 96, 97: n = A,T,C or G
gactggaagagcactgtttataccgacaactaaataataaaaagttggaggctcatcgttcctattcaggcagatgttatcgaggtccgacnnnnnntcaaaatactattaatattaaacttaatcgatcggatacgcatgaggct

SEQ ID NO: 6445 - DNA, 146 bp, Artificial Sequence
  Bisulfite Padlock Probe
  misc_feature 94, 95, 96, 97, 98, 99: n = A,T,C or G
gactggaagagcactgtttataccgcaaacccaaaatccaaaaacgttggaggctcatcgttcctattcaggcagatgttatcgaggtccgacnnnnnnataaacacgctaaaaacgctacgcatagatcggatacgcatgaggct

SEQ ID NO: 6446 - DNA, 146 bp, Artificial Sequence
  Bisulfite Padlock Probe
  misc_feature 94, 95, 96, 97, 98, 99: n = A,T,C or G
gactggaagagcactgtttataccgcaaacccaaaatccgaaaacgttggaggctcatcgttcctattcaggcagatgttatcgaggtccgacnnnnnnataaacacgctaaaaacgctacgcgtagatcggatacgcatgaggct

SEQ ID NO: 6447 - DNA, 146 bp, Artificial Sequence
  Bisulfite Padlock Probe
  misc_feature 92, 93, 94, 95, 96, 97: n = A,T,C or G
gactggaagagcactgtttatacgctataaaataactactaccgttggaggctcatcgttcctattcaggcagatgttatcgaggtccgacnnnnnnccgacacccttctattcctaatataactagatcggatacgcatgaggct

SEQ ID NO: 6448 - DNA, 146 bp, Artificial Sequence
  Bisulfite Padlock Probe
  misc_feature 95, 96, 97, 98, 99, 100: n = A,T,C or G
gactggaagagcactgtttatacgtaataaccgaacgtaacaaaaagttggaggctcatcgttcctattcaggcagatgttatcgaggtccgacnnnnnnaaaaatcttctacgtaatcgaaacacgatcggatacgcatgaggct

SEQ ID NO: 6449 - DNA, 146 bp, Artificial Sequence
  Bisulfite Padlock Probe
  misc_feature 95, 96, 97, 98, 99, 100: n = A,T,C or G
gactggaagagcactgtttatacgtaataaccgaacgtaacgaaaagttggaggctcatcgttcctattcaggcagatgttatcgaggtccgacnnnnnnaaaaatcttctacgtaatcgaaacgcgatcggatacgcatgaggct

SEQ ID NO: 6450 - DNA, 146 bp, Artificial Sequence
  Bisulfite Padlock Probe
  misc_feature 94, 95, 96, 97, 98, 99: n = A,T,C or G
gactggaagagcactgtttatactaaaaataactatacaaattacgttggaggctcatcgttcctattcaggcagatgttatcgaggtccgacnnnnnnacactaacaaacctatccccctaacccgatcggatacgcatgaggct

SEQ ID NO: 6451 - DNA, 146 bp, Artificial Sequence
  Bisulfite Padlock Probe
  misc_feature 94, 95, 96, 97, 98, 99: n = A,T,C or G
gactggaagagcactgtttatactaaaaataactatacgaattacgttggaggctcatcgttcctattcaggcagatgttatcgaggtccgacnnnnnnacactaacaaacctatccccctaacccgatcggatacgcatgaggct

SEQ ID NO: 6452 - DNA, 146 bp, Artificial Sequence
  Bisulfite Padlock Probe
  misc_feature 96, 97, 98, 99, 100, 101: n = A,T,C or G
gactggaagagcactgtttatacttataaaaattactctaaatcttagttggaggctcatcgttcctattcaggcagatgttatcgaggtccgacnnnnnncttaacaaataaaaacacataaacagatcggatacgcatgaggct

SEQ ID NO: 6453 - DNA, 146 bp, Artificial Sequence
  Bisulfite Padlock Probe
  misc_feature 96, 97, 98, 99, 100, 101: n = A,T,C or G
gactggaagagcactgtttatacttataaaaattactctaaatcttagttggaggctcatcgttcctattcaggcagatgttatcgaggtccgacnnnnnncttaacaaataaaaacacgtaaacagatcggatacgcatgaggct

SEQ ID NO: 6454 - DNA, 146 bp, Artificial Sequence
  Bisulfite Padlock Probe
  misc_feature 96, 97, 98, 99, 100, 101: n = A,T,C or G
gactggaagagcactgtttatatacctccttccctccctccctctctgttggaggctcatcgttcctattcaggcagatgttatcgaggtccgacnnnnnnaaaacttcatcctccaaccataaccgatcggatacgcatgaggct

SEQ ID NO: 6455 - DNA, 146 bp, Artificial Sequence
  Bisulfite Padlock Probe
  misc_feature 96, 97, 98, 99, 100, 101: n = A,T,C or G
gactggaagagcactgtttatatacctccttccctccctccctctctgttggaggctcatcgttcctattcaggcagatgttatcgaggtccgacnnnnnnaaaacttcatcctccaaccgtaaccgatcggatacgcatgaggct

SEQ ID NO: 6456 - DNA, 146 bp, Artificial Sequence
  Bisulfite Padlock Probe
  misc_feature 92, 93, 94, 95, 96, 97: n = A,T,C or G
gactggaagagcactgtttatatcactaaaacatcaaaaatacgttggaggctcatcgttcctattcaggcagatgttatcgaggtccgacnnnnnnccttcccgcaataaacaactacattcatcgatcggatacgcatgaggct

SEQ ID NO: 6457 - DNA, 146 bp, Artificial Sequence
  Bisulfite Padlock Probe
  misc_feature 92, 93, 94, 95, 96, 97: n = A,T,C or G
gactggaagagcactgtttatatcactaaaacatcaaaaatacgttggaggctcatcgttcctattcaggcagatgttatcgaggtccgacnnnnnnccttcccgcaataaacgactacattcatcgatcggatacgcatgaggct

SEQ ID NO: 6458 - DNA, 146 bp, Artificial Sequence
  Bisulfite Padlock Probe
  misc_feature 93, 94, 95, 96, 97, 98: n = A,T,C or G
gactggaagagcactgtttatatccgcgaaccgaacaacccaacgttggaggctcatcgttcctattcaggcagatgttatcgaggtccgacnnnnnnacgacgaatacgaaccatacctactaacgatcggatacgcatgaggct

SEQ ID NO: 6459 - DNA, 146 bp, Artificial Sequence
  Bisulfite Padlock Probe
  misc_feature 93, 94, 95, 96, 97, 98: n = A,T,C or G
gactggaagagcactgtttatatccgcgaaccgaacaacccgacgttggaggctcatcgttcctattcaggcagatgttatcgaggtccgacnnnnnnacgacgaatacgaaccgtacctactaacgatcggatacgcatgaggct

SEQ ID NO: 6460 - DNA, 146 bp, Artificial Sequence
  Bisulfite Padlock Probe
  misc_feature 94, 95, 96, 97, 98, 99: n = A,T,C or G
gactggaagagcactgtttatattttatactaaatctcatttttagttggaggctcatcgttcctattcaggcagatgttatcgaggtccgacnnnnnnccaaccaaaattaaactccataaacttgatcggatacgcatgaggct

SEQ ID NO: 6461 - DNA, 146 bp, Artificial Sequence
  Bisulfite Padlock Probe
  misc_feature 94, 95, 96, 97, 98, 99: n = A,T,C or G
gactggaagagcactgtttatattttatactaaatctcatttttagttggaggctcatcgttcctattcaggcagatgttatcgaggtccgacnnnnnnccaaccaaaattaaactccgtaaacttgatcggatacgcatgaggct

SEQ ID NO: 6462 - DNA, 146 bp, Artificial Sequence
  Bisulfite Padlock Probe
  misc_feature 92, 93, 94, 95, 96, 97: n = A,T,C or G
gactggaagagcactgtttatcaacaaattatcaaacaactacgttggaggctcatcgttcctattcaggcagatgttatcgaggtccgacnnnnnntaccaaaaatatcccctaaaaaccccaacgatcggatacgcatgaggct

SEQ ID NO: 6463 - DNA, 146 bp, Artificial Sequence
  Bisulfite Padlock Probe
  misc_feature 92, 93, 94, 95, 96, 97: n = A,T,C or G
gactggaagagcactgtttatccaaaaacaactaaaaccccctgttggaggctcatcgttcctattcaggcagatgttatcgaggtccgacnnnnnnaaaactaaccctcacccctctctaaaatcgatcggatacgcatgaggct

SEQ ID NO: 6464 - DNA, 146 bp, Artificial Sequence
  Bisulfite Padlock Probe
  misc_feature 92, 93, 94, 95, 96, 97: n = A,T,C or G
gactggaagagcactgtttatccccgcaataccgaaacaaaacgttggaggctcatcgttcctattcaggcagatgttatcgaggtccgacnnnnnnccccaaaaactactaaaccaaaccctctcgatcggatacgcatgaggct

SEQ ID NO: 6465 - DNA, 146 bp, Artificial Sequence
  Bisulfite Padlock Probe
  misc_feature 92, 93, 94, 95, 96, 97: n = A,T,C or G
gactggaagagcactgtttatccccgcaataccgaaacgaaacgttggaggctcatcgttcctattcaggcagatgttatcgaggtccgacnnnnnnccccaaaaactactaaaccgaaccctctcgatcggatacgcatgaggct

SEQ ID NO: 6466 - DNA, 146 bp, Artificial Sequence
  Bisulfite Padlock Probe
  misc_feature 95, 96, 97, 98, 99, 100: n = A,T,C or G
gactggaagagcactgtttatcccctcgaaaaccccaaaaacaaacgttggaggctcatcgttcctattcaggcagatgttatcgaggtccgacnnnnnntcaaaaacaaccttaccccctctcccgatcggatacgcatgaggct

SEQ ID NO: 6467 - DNA, 146 bp, Artificial Sequence
  Bisulfite Padlock Probe
  misc_feature 95, 96, 97, 98, 99, 100: n = A,T,C or G
gactggaagagcactgtttatcccctcgaaaaccccgaaaacaaacgttggaggctcatcgttcctattcaggcagatgttatcgaggtccgacnnnnnntcaaaaacaaccttaccccctctcccgatcggatacgcatgaggct

SEQ ID NO: 6468 - DNA, 146 bp, Artificial Sequence
  Bisulfite Padlock Probe
  misc_feature 92, 93, 94, 95, 96, 97: n = A,T,C or G
gactggaagagcactgtttatccgaaaacaactaaaaccccctgttggaggctcatcgttcctattcaggcagatgttatcgaggtccgacnnnnnnaaaactaaccctcgcccctctctaaaatcgatcggatacgcatgaggct

SEQ ID NO: 6469 - DNA, 146 bp, Artificial Sequence
  Bisulfite Padlock Probe
  misc_feature 93, 94, 95, 96, 97, 98: n = A,T,C or G
gactggaagagcactgtttatcctactacaattactactacaccgttggaggctcatcgttcctattcaggcagatgttatcgaggtccgacnnnnnncctacgcctaatactacacctactactagatcggatacgcatgaggct

SEQ ID NO: 6470 - DNA, 146 bp, Artificial Sequence
  Bisulfite Padlock Probe
  misc_feature 93, 94, 95, 96, 97, 98: n = A,T,C or G
gactggaagagcactgtttatcctactacaattactactacgccgttggaggctcatcgttcctattcaggcagatgttatcgaggtccgacnnnnnncctacgcctaatactacgcctactactagatcggatacgcatgaggct

SEQ ID NO: 6471 - DNA, 146 bp, Artificial Sequence
  Bisulfite Padlock Probe
  misc_feature 92, 93, 94, 95, 96, 97: n = A,T,C or G
gactggaagagcactgtttatcgacaaattatcaaacaactacgttggaggctcatcgttcctattcaggcagatgttatcgaggtccgacnnnnnntaccaaaaatatcccctaaaaaccccgacgatcggatacgcatgaggct

SEQ ID NO: 6472 - DNA, 146 bp, Artificial Sequence
  Bisulfite Padlock Probe
  misc_feature 93, 94, 95, 96, 97, 98: n = A,T,C or G
gactggaagagcactgtttatctaaaccccgaacgacaacatccgttggaggctcatcgttcctattcaggcagatgttatcgaggtccgacnnnnnnaaaaaccgaaaataccaaaaccctaaaagatcggatacgcatgaggct

SEQ ID NO: 6473 - DNA, 146 bp, Artificial Sequence
  Bisulfite Padlock Probe
  misc_feature 93, 94, 95, 96, 97, 98: n = A,T,C or G
gactggaagagcactgtttatctaaaccccgaacgacaacgtccgttggaggctcatcgttcctattcaggcagatgttatcgaggtccgacnnnnnnaaaaaccgaaaataccgaaaccctaaaagatcggatacgcatgaggct

SEQ ID NO: 6474 - DNA, 146 bp, Artificial Sequence
  Bisulfite Padlock Probe
  misc_feature 96, 97, 98, 99, 100, 101: n = A,T,C or G
gactggaagagcactgtttatctaacaccccaacatctaatctccccgttggaggctcatcgttcctattcaggcagatgttatcgaggtccgacnnnnnntcccaccccaatcctaaattaaaaagatcggatacgcatgaggct

SEQ ID NO: 6475 - DNA, 146 bp, Artificial Sequence
  Bisulfite Padlock Probe
  misc_feature 96, 97, 98, 99, 100, 101: n = A,T,C or G
gactggaagagcactgtttatctaacaccccaacgtctaatctccccgttggaggctcatcgttcctattcaggcagatgttatcgaggtccgacnnnnnntcccaccccgatcctaaattaaaaagatcggatacgcatgaggct

SEQ ID NO: 6476 - DNA, 146 bp, Artificial Sequence
  Bisulfite Padlock Probe
  misc_feature 93, 94, 95, 96, 97, 98: n = A,T,C or G
gactggaagagcactgtttatctatatcctcctcttttaaaaacgttggaggctcatcgttcctattcaggcagatgttatcgaggtccgacnnnnnnaaaaactaaatcctatctacataaatttgatcggatacgcatgaggct

SEQ ID NO: 6477 - DNA, 146 bp, Artificial Sequence
  Bisulfite Padlock Probe
  misc_feature 93, 94, 95, 96, 97, 98: n = A,T,C or G
gactggaagagcactgtttatctatatcctcctcttttaaaaacgttggaggctcatcgttcctattcaggcagatgttatcgaggtccgacnnnnnnaaaaactaaatcctatctacgtaaatttgatcggatacgcatgaggct

SEQ ID NO: 6478 - DNA, 146 bp, Artificial Sequence
  Bisulfite Padlock Probe
  misc_feature 96, 97, 98, 99, 100, 101: n = A,T,C or G
gactggaagagcactgtttattaaaacccgaccgccatcactctatcgttggaggctcatcgttcctattcaggcagatgttatcgaggtccgacnnnnnnataaccatactaaccacacacactcgatcggatacgcatgaggct

SEQ ID NO: 6479 - DNA, 146 bp, Artificial Sequence
  Bisulfite Padlock Probe
  misc_feature 96, 97, 98, 99, 100, 101: n = A,T,C or G
gactggaagagcactgtttattaaaacccgaccgccatcgctctatcgttggaggctcatcgttcctattcaggcagatgttatcgaggtccgacnnnnnnataaccatactaaccgcacacactcgatcggatacgcatgaggct

SEQ ID NO: 6480 - DNA, 146 bp, Artificial Sequence
  Bisulfite Padlock Probe
  misc_feature 95, 96, 97, 98, 99, 100: n = A,T,C or G
gactggaagagcactgtttattaaataaattcccttttaatttattgttggaggctcatcgttcctattcaggcagatgttatcgaggtccgacnnnnnnattcaaaactaaaattctacactctcgatcggatacgcatgaggct

SEQ ID NO: 6481 - DNA, 146 bp, Artificial Sequence
  Bisulfite Padlock Probe
  misc_feature 95, 96, 97, 98, 99, 100: n = A,T,C or G
gactggaagagcactgtttattaaataaattcccttttaatttattgttggaggctcatcgttcctattcaggcagatgttatcgaggtccgacnnnnnnattcgaaactaaaattctacactctcgatcggatacgcatgaggct

SEQ ID NO: 6482 - DNA, 146 bp, Artificial Sequence
  Bisulfite Padlock Probe
  misc_feature 92, 93, 94, 95, 96, 97: n = A,T,C or G
gactggaagagcactgtttattaacgacgacgataacgacaacgttggaggctcatcgttcctattcaggcagatgttatcgaggtccgacnnnnnntcccgaaaaccccaaaaatcgacaaaaaagatcggatacgcatgaggct

SEQ ID NO: 6483 - DNA, 146 bp, Artificial Sequence
  Bisulfite Padlock Probe
  misc_feature 92, 93, 94, 95, 96, 97: n = A,T,C or G
gactggaagagcactgtttattaacgacgacgataacgacgacgttggaggctcatcgttcctattcaggcagatgttatcgaggtccgacnnnnnntcccgaaaaccccaaaaatcgacgaaaaagatcggatacgcatgaggct

SEQ ID NO: 6484 - DNA, 146 bp, Artificial Sequence
  Bisulfite Padlock Probe
  misc_feature 93, 94, 95, 96, 97, 98: n = A,T,C or G
gactggaagagcactgtttattacgaaataacgtcactaaacccgttggaggctcatcgttcctattcaggcagatgttatcgaggtccgacnnnnnncaaaaacgctcaaaatccacaataacccgatcggatacgcatgaggct

SEQ ID NO: 6485 - DNA, 146 bp, Artificial Sequence
  Bisulfite Padlock Probe
  misc_feature 93, 94, 95, 96, 97, 98: n = A,T,C or G
gactggaagagcactgtttattacgaaataacgtcgctaaacccgttggaggctcatcgttcctattcaggcagatgttatcgaggtccgacnnnnnncaaaaacgctcaaaatccgcaataacccgatcggatacgcatgaggct

SEQ ID NO: 6486 - DNA, 146 bp, Artificial Sequence
  Bisulfite Padlock Probe
  misc_feature 93, 94, 95, 96, 97, 98: n = A,T,C or G
gactggaagagcactgtttattactcgaaacacaatcccaaaaagttggaggctcatcgttcctattcaggcagatgttatcgaggtccgacnnnnnnaacaaataaaattaaaaccgcataactcgatcggatacgcatgaggct

SEQ ID NO: 6487 - DNA, 146 bp, Artificial Sequence
  Bisulfite Padlock Probe
  misc_feature 93, 94, 95, 96, 97, 98: n = A,T,C or G
gactggaagagcactgtttattactcgaaacgcaatcccaaaaagttggaggctcatcgttcctattcaggcagatgttatcgaggtccgacnnnnnnaacaaataaaattaaaaccgcgtaactcgatcggatacgcatgaggct

SEQ ID NO: 6488 - DNA, 146 bp, Artificial Sequence
  Bisulfite Padlock Probe
  misc_feature 92, 93, 94, 95, 96, 97: n = A,T,C or G
gactggaagagcactgtttattataaacaaccaccaaaccaacgttggaggctcatcgttcctattcaggcagatgttatcgaggtccgacnnnnnnaaaaatcccactccttaccacctaaacttgatcggatacgcatgaggct

SEQ ID NO: 6489 - DNA, 146 bp, Artificial Sequence
  Bisulfite Padlock Probe
  misc_feature 92, 93, 94, 95, 96, 97: n = A,T,C or G
gactggaagagcactgtttattataaacaaccgccaaaccaacgttggaggctcatcgttcctattcaggcagatgttatcgaggtccgacnnnnnnaaaaatcccactccttaccacctaaacttgatcggatacgcatgaggct

SEQ ID NO: 6490 - DNA, 146 bp, Artificial Sequence
  Bisulfite Padlock Probe
  misc_feature 96, 97, 98, 99, 100, 101: n = A,T,C or G
gactggaagagcactgtttattcaaaatatttaaccttaattaaaacgttggaggctcatcgttcctattcaggcagatgttatcgaggtccgacnnnnnnaaacaaacgcgcaaccacaactctcgatcggatacgcatgaggct

SEQ ID NO: 6491 - DNA, 146 bp, Artificial Sequence
  Bisulfite Padlock Probe
  misc_feature 96, 97, 98, 99, 100, 101: n = A,T,C or G
gactggaagagcactgtttattcaaaatatttaaccttaattaaaacgttggaggctcatcgttcctattcaggcagatgttatcgaggtccgacnnnnnnaaacaaacgcgcgaccacaactctcgatcggatacgcatgaggct

SEQ ID NO: 6492 - DNA, 146 bp, Artificial Sequence
  Bisulfite Padlock Probe
  misc_feature 93, 94, 95, 96, 97, 98: n = A,T,C or G
gactggaagagcactgtttattcccaaaaacaacccaaattcccgttggaggctcatcgttcctattcaggcagatgttatcgaggtccgacnnnnnnctcctccgctttcacaacaccttaacttgatcggatacgcatgaggct

SEQ ID NO: 6493 - DNA, 146 bp, Artificial Sequence
  Bisulfite Padlock Probe
  misc_feature 93, 94, 95, 96, 97, 98: n = A,T,C or G
gactggaagagcactgtttattcccaaaaacaacccgaattcccgttggaggctcatcgttcctattcaggcagatgttatcgaggtccgacnnnnnnctcctccgctttcgcaacaccttaacttgatcggatacgcatgaggct

SEQ ID NO: 6494 - DNA, 146 bp, Artificial Sequence
  Bisulfite Padlock Probe
  misc_feature 95, 96, 97, 98, 99, 100: n = A,T,C or G
gactggaagagcactgtttattcccgaaattaaaatacaaacccccgttggaggctcatcgttcctattcaggcagatgttatcgaggtccgacnnnnnncactaaaactccgaacaactaaaaccgatcggatacgcatgaggct

SEQ ID NO: 6495 - DNA, 146 bp, Artificial Sequence
  Bisulfite Padlock Probe
  misc_feature 95, 96, 97, 98, 99, 100: n = A,T,C or G
gactggaagagcactgtttattcccgaaattaaaatacgaacccccgttggaggctcatcgttcctattcaggcagatgttatcgaggtccgacnnnnnncactaaaactccgaacgactaaaaccgatcggatacgcatgaggct

SEQ ID NO: 6496 - DNA, 146 bp, Artificial Sequence
  Bisulfite Padlock Probe
  misc_feature 96, 97, 98, 99, 100, 101: n = A,T,C or G
gactggaagagcactgtttatttacaaaaatcctttcctaaaataaagttggaggctcatcgttcctattcaggcagatgttatcgaggtccgacnnnnnnatctaaaaatccaaataaaaactaagatcggatacgcatgaggct

SEQ ID NO: 6497 - DNA, 146 bp, Artificial Sequence
  Bisulfite Padlock Probe
  misc_feature 96, 97, 98, 99, 100, 101: n = A,T,C or G
gactggaagagcactgtttatttacaaaaatcctttcctaaaataaagttggaggctcatcgttcctattcaggcagatgttatcgaggtccgacnnnnnnatctaaaaatccgaataaaaactaagatcggatacgcatgaggct

SEQ ID NO: 6498 - DNA, 146 bp, Artificial Sequence
  Bisulfite Padlock Probe
  misc_feature 96, 97, 98, 99, 100, 101: n = A,T,C or G
gactggaagagcactgtttatttcacattaatttttaattacacaacgttggaggctcatcgttcctattcaggcagatgttatcgaggtccgacnnnnnnatcttccaccgctacgaaacatcccgatcggatacgcatgaggct

SEQ ID NO: 6499 - DNA, 146 bp, Artificial Sequence
  Bisulfite Padlock Probe
  misc_feature 96, 97, 98, 99, 100, 101: n = A,T,C or G
gactggaagagcactgtttatttcacattaatttttaattacacaacgttggaggctcatcgttcctattcaggcagatgttatcgaggtccgacnnnnnnatcttccaccgctacgaaacgtcccgatcggatacgcatgaggct

SEQ ID NO: 6500 - DNA, 146 bp, Artificial Sequence
  Bisulfite Padlock Probe
  misc_feature 95, 96, 97, 98, 99, 100: n = A,T,C or G
gactggaagagcactgtttatttccaacaccataaacctctaatatgttggaggctcatcgttcctattcaggcagatgttatcgaggtccgacnnnnnnataacccaccgcactacacccaaaaagatcggatacgcatgaggct

SEQ ID NO: 6501 - DNA, 146 bp, Artificial Sequence
  Bisulfite Padlock Probe
  misc_feature 95, 96, 97, 98, 99, 100: n = A,T,C or G
gactggaagagcactgtttatttccaacgccataaacctctaatatgttggaggctcatcgttcctattcaggcagatgttatcgaggtccgacnnnnnnataacccaccgcactacgcccaaaaagatcggatacgcatgaggct

SEQ ID NO: 6502 - DNA, 146 bp, Artificial Sequence
  Bisulfite Padlock Probe
  misc_feature 96, 97, 98, 99, 100, 101: n = A,T,C or G
gactggaagagcactgtttatttcctctcaaacaccaataactaaacgttggaggctcatcgttcctattcaggcagatgttatcgaggtccgacnnnnnncgctcaactactaaacactcataccgatcggatacgcatgaggct

SEQ ID NO: 6503 - DNA, 146 bp, Artificial Sequence
  Bisulfite Padlock Probe
  misc_feature 96, 97, 98, 99, 100, 101: n = A,T,C or G
gactggaagagcactgtttatttcctctcaaacaccaataactaaacgttggaggctcatcgttcctattcaggcagatgttatcgaggtccgacnnnnnncgctcaactactaaacgctcataccgatcggatacgcatgaggct

SEQ ID NO: 6504 - DNA, 146 bp, Artificial Sequence
  Bisulfite Padlock Probe
  misc_feature 92, 93, 94, 95, 96, 97: n = A,T,C or G
gactggaagagcactgtttcaaaaaatttccaacctccaaaaagttggaggctcatcgttcctattcaggcagatgttatcgaggtccgacnnnnnntatccccaaaataaaccctcaaataaaccgatcggatacgcatgaggct

SEQ ID NO: 6505 - DNA, 146 bp, Artificial Sequence
  Bisulfite Padlock Probe
  misc_feature 96, 97, 98, 99, 100, 101: n = A,T,C or G
gactggaagagcactgtttcaaaaacgcgtcaaacgaaacaaactccgttggaggctcatcgttcctattcaggcagatgttatcgaggtccgacnnnnnnactacaacccaaaaattccaactaagatcggatacgcatgaggct

SEQ ID NO: 6506 - DNA, 146 bp, Artificial Sequence
  Bisulfite Padlock Probe
  misc_feature 96, 97, 98, 99, 100, 101: n = A,T,C or G
gactggaagagcactgtttcaaaaacgcgtcaaacgaaacgaactccgttggaggctcatcgttcctattcaggcagatgttatcgaggtccgacnnnnnnactacaacccaaaaattccgactaagatcggatacgcatgaggct

SEQ ID NO: 6507 - DNA, 146 bp, Artificial Sequence
  Bisulfite Padlock Probe
  misc_feature 92, 93, 94, 95, 96, 97: n = A,T,C or G
gactggaagagcactgtttcaaaaataacctacccaaaaccacgttggaggctcatcgttcctattcaggcagatgttatcgaggtccgacnnnnnncctaccgaaattccaactcgaaacacaaagatcggatacgcatgaggct

SEQ ID NO: 6508 - DNA, 146 bp, Artificial Sequence
  Bisulfite Padlock Probe
  misc_feature 92, 93, 94, 95, 96, 97: n = A,T,C or G
gactggaagagcactgtttcaaaaataacctacccgaaaccacgttggaggctcatcgttcctattcaggcagatgttatcgaggtccgacnnnnnncctaccgaaattccaactcgaaacgcaaagatcggatacgcatgaggct

SEQ ID NO: 6509 - DNA, 146 bp, Artificial Sequence
  Bisulfite Padlock Probe
  misc_feature 92, 93, 94, 95, 96, 97: n = A,T,C or G
gactggaagagcactgtttcaaaactcttaataaatcaccctagttggaggctcatcgttcctattcaggcagatgttatcgaggtccgacnnnnnnctaaaaatcttattaaaatacaaattctagatcggatacgcatgaggct

SEQ ID NO: 6510 - DNA, 146 bp, Artificial Sequence
  Bisulfite Padlock Probe
  misc_feature 92, 93, 94, 95, 96, 97: n = A,T,C or G
gactggaagagcactgtttcaaaactcttaataaatcgccctagttggaggctcatcgttcctattcaggcagatgttatcgaggtccgacnnnnnnctaaaaatcttattaaaatacaaattctagatcggatacgcatgaggct

SEQ ID NO: 6511 - DNA, 146 bp, Artificial Sequence
  Bisulfite Padlock Probe
  misc_feature 93, 94, 95, 96, 97, 98: n = A,T,C or G
gactggaagagcactgtttcaaacctccctacttttacatacccgttggaggctcatcgttcctattcaggcagatgttatcgaggtccgacnnnnnnaacaaaactaacactcaaaaaccaaaaagatcggatacgcatgaggct

SEQ ID NO: 6512 - DNA, 146 bp, Artificial Sequence
  Bisulfite Padlock Probe
  misc_feature 93, 94, 95, 96, 97, 98: n = A,T,C or G
gactggaagagcactgtttcaaacctccctacttttacatacccgttggaggctcatcgttcctattcaggcagatgttatcgaggtccgacnnnnnnaacaaaactaacgctcaaaaaccaaaaagatcggatacgcatgaggct

SEQ ID NO: 6513 - DNA, 146 bp, Artificial Sequence
  Bisulfite Padlock Probe
  misc_feature 92, 93, 94, 95, 96, 97: n = A,T,C or G
gactggaagagcactgtttcaaataaatttaaatcattccaacgttggaggctcatcgttcctattcaggcagatgttatcgaggtccgacnnnnnntaaacaaactaattaaaaacccaacctaagatcggatacgcatgaggct

SEQ ID NO: 6514 - DNA, 146 bp, Artificial Sequence
  Bisulfite Padlock Probe
  misc_feature 92, 93, 94, 95, 96, 97: n = A,T,C or G
gactggaagagcactgtttcaaataaatttaaatcgttccaacgttggaggctcatcgttcctattcaggcagatgttatcgaggtccgacnnnnnntaaacaaactaattaaaaacccaacctaagatcggatacgcatgaggct

SEQ ID NO: 6515 - DNA, 146 bp, Artificial Sequence
  Bisulfite Padlock Probe
  misc_feature 93, 94, 95, 96, 97, 98: n = A,T,C or G
gactggaagagcactgtttcaacaaaaccttaaaacctccttaagttggaggctcatcgttcctattcaggcagatgttatcgaggtccgacnnnnnnccctctcacctctcaaatcccaaaccttgatcggatacgcatgaggct

SEQ ID NO: 6516 - DNA, 146 bp, Artificial Sequence
  Bisulfite Padlock Probe
  misc_feature 93, 94, 95, 96, 97, 98: n = A,T,C or G
gactggaagagcactgtttcaacaaccaacataaaaacaacctcgttggaggctcatcgttcctattcaggcagatgttatcgaggtccgacnnnnnntccgaaaaatctcaaacgcaaacaaatcgatcggatacgcatgaggct

SEQ ID NO: 6517 - DNA, 146 bp, Artificial Sequence
  Bisulfite Padlock Probe
  misc_feature 96, 97, 98, 99, 100, 101: n = A,T,C or G
gactggaagagcactgtttcaaccaccaccccaactatttaaaacccgttggaggctcatcgttcctattcaggcagatgttatcgaggtccgacnnnnnncccaaaaccaacctccctctcccttgatcggatacgcatgaggct

SEQ ID NO: 6518 - DNA, 146 bp, Artificial Sequence
  Bisulfite Padlock Probe
  misc_feature 96, 97, 98, 99, 100, 101: n = A,T,C or G
gactggaagagcactgtttcaaccaccaccccgactatttaaaacccgttggaggctcatcgttcctattcaggcagatgttatcgaggtccgacnnnnnncccaaaaccaacctccctctcccttgatcggatacgcatgaggct

SEQ ID NO: 6519 - DNA, 146 bp, Artificial Sequence
  Bisulfite Padlock Probe
  misc_feature 92, 93, 94, 95, 96, 97: n = A,T,C or G
gactggaagagcactgtttcaacccaaacatcctacccctactgttggaggctcatcgttcctattcaggcagatgttatcgaggtccgacnnnnnncaaacatctctaaatctccacccaaaaccgatcggatacgcatgaggct

SEQ ID NO: 6520 - DNA, 146 bp, Artificial Sequence
  Bisulfite Padlock Probe
  misc_feature 92, 93, 94, 95, 96, 97: n = A,T,C or G
gactggaagagcactgtttcaacccaaacgtcctacccctactgttggaggctcatcgttcctattcaggcagatgttatcgaggtccgacnnnnnncaaacatctctaaatctccgcccaaaaccgatcggatacgcatgaggct

SEQ ID NO: 6521 - DNA, 146 bp, Artificial Sequence
  Bisulfite Padlock Probe
  misc_feature 93, 94, 95, 96, 97, 98: n = A,T,C or G
gactggaagagcactgtttcaacccaaatacaccaaactaaaaagttggaggctcatcgttcctattcaggcagatgttatcgaggtccgacnnnnnnctacccgcctacaacttcaacgacaatagatcggatacgcatgaggct

SEQ ID NO: 6522 - DNA, 146 bp, Artificial Sequence
  Bisulfite Padlock Probe
  misc_feature 93, 94, 95, 96, 97, 98: n = A,T,C or G
gactggaagagcactgtttcaacccaaatacaccaaactaaaaagttggaggctcatcgttcctattcaggcagatgttatcgaggtccgacnnnnnnctacccgcctacaacttcaacgacgatagatcggatacgcatgaggct

SEQ ID NO: 6523 - DNA, 146 bp, Artificial Sequence
  Bisulfite Padlock Probe
  misc_feature 94, 95, 96, 97, 98, 99: n = A,T,C or G
gactggaagagcactgtttcaacccaaccacttcgctacaaaaaagttggaggctcatcgttcctattcaggcagatgttatcgaggtccgacnnnnnnaaaaaccaaaccaaccgcgacaaaaaagatcggatacgcatgaggct

SEQ ID NO: 6524 - DNA, 146 bp, Artificial Sequence
  Bisulfite Padlock Probe
  misc_feature 94, 95, 96, 97, 98, 99: n = A,T,C or G
gactggaagagcactgtttcaacccaaccacttcgctacgaaaaagttggaggctcatcgttcctattcaggcagatgttatcgaggtccgacnnnnnnaaaaaccaaaccaaccgcgacgaaaaagatcggatacgcatgaggct

SEQ ID NO: 6525 - DNA, 146 bp, Artificial Sequence
  Bisulfite Padlock Probe
  misc_feature 93, 94, 95, 96, 97, 98: n = A,T,C or G
gactggaagagcactgtttcaacgaccaacataaaaacaacctcgttggaggctcatcgttcctattcaggcagatgttatcgaggtccgacnnnnnntccgaaaaatctcaaacgcgaacaaatcgatcggatacgcatgaggct

SEQ ID NO: 6526 - DNA, 146 bp, Artificial Sequence
  Bisulfite Padlock Probe
  misc_feature 96, 97, 98, 99, 100, 101: n = A,T,C or G
gactggaagagcactgtttcaacgtcctaacacaaaaaccctaaaaagttggaggctcatcgttcctattcaggcagatgttatcgaggtccgacnnnnnntcaacgcgctaaaacaccgcaaatcgatcggatacgcatgaggct

SEQ ID NO: 6527 - DNA, 146 bp, Artificial Sequence
  Bisulfite Padlock Probe
  misc_feature 96, 97, 98, 99, 100, 101: n = A,T,C or G
gactggaagagcactgtttcaacgtcctaacgcaaaaaccctaaaaagttggaggctcatcgttcctattcaggcagatgttatcgaggtccgacnnnnnntcaacgcgctaaaacaccgcgaatcgatcggatacgcatgaggct

SEQ ID NO: 6528 - DNA, 146 bp, Artificial Sequence
  Bisulfite Padlock Probe
  misc_feature 93, 94, 95, 96, 97, 98: n = A,T,C or G
gactggaagagcactgtttcaactacgactacttctcgccatccgttggaggctcatcgttcctattcaggcagatgttatcgaggtccgacnnnnnncacgctcttctcgaaacaaaaactattagatcggatacgcatgaggct

SEQ ID NO: 6529 - DNA, 146 bp, Artificial Sequence
  Bisulfite Padlock Probe
  misc_feature 93, 94, 95, 96, 97, 98: n = A,T,C or G
gactggaagagcactgtttcaactacgactacttctcgccgtccgttggaggctcatcgttcctattcaggcagatgttatcgaggtccgacnnnnnncacgctcttctcgaaacgaaaactattagatcggatacgcatgaggct

SEQ ID NO: 6530 - DNA, 146 bp, Artificial Sequence
  Bisulfite Padlock Probe
  misc_feature 92, 93, 94, 95, 96, 97: n = A,T,C or G
gactggaagagcactgtttcaactcccttaacccaaataaaaagttggaggctcatcgttcctattcaggcagatgttatcgaggtccgacnnnnnnaatttctctaattttattcacaaaactaagatcggatacgcatgaggct

SEQ ID NO: 6531 - DNA, 146 bp, Artificial Sequence
  Bisulfite Padlock Probe
  misc_feature 96, 97, 98, 99, 100, 101: n = A,T,C or G
gactggaagagcactgtttcaactcgacaactcaaccaacactacatgttggaggctcatcgttcctattcaggcagatgttatcgaggtccgacnnnnnntccaaacccataaaaccccacttccgatcggatacgcatgaggct

SEQ ID NO: 6532 - DNA, 146 bp, Artificial Sequence
  Bisulfite Padlock Probe
  misc_feature 96, 97, 98, 99, 100, 101: n = A,T,C or G
gactggaagagcactgtttcaactcgacaactcaaccaacgctacatgttggaggctcatcgttcctattcaggcagatgttatcgaggtccgacnnnnnntccgaacccataaaaccccacttccgatcggatacgcatgaggct

SEQ ID NO: 6533 - DNA, 146 bp, Artificial Sequence
  Bisulfite Padlock Probe
  misc_feature 92, 93, 94, 95, 96, 97: n = A,T,C or G
gactggaagagcactgtttcaatattcacaccacctaacaaccgttggaggctcatcgttcctattcaggcagatgttatcgaggtccgacnnnnnnaaaatatatctctacttatttcccaatccgatcggatacgcatgaggct

SEQ ID NO: 6534 - DNA, 146 bp, Artificial Sequence
  Bisulfite Padlock Probe
  misc_feature 92, 93, 94, 95, 96, 97: n = A,T,C or G
gactggaagagcactgtttcaatattcacaccgcctaacaaccgttggaggctcatcgttcctattcaggcagatgttatcgaggtccgacnnnnnnaaaatatatctctacttatttcccaatccgatcggatacgcatgaggct

SEQ ID NO: 6535 - DNA, 146 bp, Artificial Sequence
  Bisulfite Padlock Probe
  misc_feature 92, 93, 94, 95, 96, 97: n = A,T,C or G
gactggaagagcactgtttcaccccaacaacaaactcttccttgttggaggctcatcgttcctattcaggcagatgttatcgaggtccgacnnnnnncaatactacaaacaacctctaaaactctagatcggatacgcatgaggct

SEQ ID NO: 6536 - DNA, 146 bp, Artificial Sequence
  Bisulfite Padlock Probe
  misc_feature 92, 93, 94, 95, 96, 97: n = A,T,C or G
gactggaagagcactgtttcacccccaacctctctatacctcagttggaggctcatcgttcctattcaggcagatgttatcgaggtccgacnnnnnnaacacacacaaaaatctttatacctaaacgatcggatacgcatgaggct

SEQ ID NO: 6537 - DNA, 146 bp, Artificial Sequence
  Bisulfite Padlock Probe
  misc_feature 92, 93, 94, 95, 96, 97: n = A,T,C or G
gactggaagagcactgtttcaccctccatttacataatactttgttggaggctcatcgttcctattcaggcagatgttatcgaggtccgacnnnnnntttctatattctaaaacctcccatataatgatcggatacgcatgaggct

SEQ ID NO: 6538 - DNA, 146 bp, Artificial Sequence
  Bisulfite Padlock Probe
  misc_feature 92, 93, 94, 95, 96, 97: n = A,T,C or G
gactggaagagcactgtttcaccctccatttacgtaatactttgttggaggctcatcgttcctattcaggcagatgttatcgaggtccgacnnnnnntttctatattctaaaacctcccatataatgatcggatacgcatgaggct

SEQ ID NO: 6539 - DNA, 146 bp, Artificial Sequence
  Bisulfite Padlock Probe
  misc_feature 92, 93, 94, 95, 96, 97: n = A,T,C or G
gactggaagagcactgtttcacctaaattccccaaaacatcttgttggaggctcatcgttcctattcaggcagatgttatcgaggtccgacnnnnnntttaaatacgtacgcccgcctcaaataccgatcggatacgcatgaggct

SEQ ID NO: 6540 - DNA, 146 bp, Artificial Sequence
  Bisulfite Padlock Probe
  misc_feature 92, 93, 94, 95, 96, 97: n = A,T,C or G
gactggaagagcactgtttcacctaaattccccgaaacatcttgttggaggctcatcgttcctattcaggcagatgttatcgaggtccgacnnnnnntttaaatacgtacgcccgcctcgaataccgatcggatacgcatgaggct

SEQ ID NO: 6541 - DNA, 146 bp, Artificial Sequence
  Bisulfite Padlock Probe
  misc_feature 95, 96, 97, 98, 99, 100: n = A,T,C or G
gactggaagagcactgtttcacctcccaaaaactaaaaatcaaaaagttggaggctcatcgttcctattcaggcagatgttatcgaggtccgacnnnnnnaaaaccaaaccaaaaacaaccctaacgatcggatacgcatgaggct

SEQ ID NO: 6542 - DNA, 146 bp, Artificial Sequence
  Bisulfite Padlock Probe
  misc_feature 95, 96, 97, 98, 99, 100: n = A,T,C or G
gactggaagagcactgtttcacctcccgaaaactaaaaatcaaaaagttggaggctcatcgttcctattcaggcagatgttatcgaggtccgacnnnnnnaaaaccaaaccaaaaacaaccctaacgatcggatacgcatgaggct

SEQ ID NO: 6543 - DNA, 146 bp, Artificial Sequence
  Bisulfite Padlock Probe
  misc_feature 92, 93, 94, 95, 96, 97: n = A,T,C or G
gactggaagagcactgtttcataaaatctacgcaaaactctatgttggaggctcatcgttcctattcaggcagatgttatcgaggtccgacnnnnnnactccaacctaaataacacaacaaaactcgatcggatacgcatgaggct

SEQ ID NO: 6544 - DNA, 146 bp, Artificial Sequence
  Bisulfite Padlock Probe
  misc_feature 92, 93, 94, 95, 96, 97: n = A,T,C or G
gactggaagagcactgtttcataaaatctacgcgaaactctatgttggaggctcatcgttcctattcaggcagatgttatcgaggtccgacnnnnnnactccaacctaaataacacaacaaaactcgatcggatacgcatgaggct

SEQ ID NO: 6545 - DNA, 146 bp, Artificial Sequence
  Bisulfite Padlock Probe
  misc_feature 96, 97, 98, 99, 100, 101: n = A,T,C or G
gactggaagagcactgtttcatcaaacaacaaaacaaccccaccaaagttggaggctcatcgttcctattcaggcagatgttatcgaggtccgacnnnnnnacttatacccaacatcaaatccatcgatcggatacgcatgaggct

SEQ ID NO: 6546 - DNA, 146 bp, Artificial Sequence
  Bisulfite Padlock Probe
  misc_feature 96, 97, 98, 99, 100, 101: n = A,T,C or G
gactggaagagcactgtttcatcaaacaacaaaacgaccccaccaaagttggaggctcatcgttcctattcaggcagatgttatcgaggtccgacnnnnnnacttatacccaacgtcaaatccatcgatcggatacgcatgaggct

SEQ ID NO: 6547 - DNA, 146 bp, Artificial Sequence
  Bisulfite Padlock Probe
  misc_feature 92, 93, 94, 95, 96, 97: n = A,T,C or G
gactggaagagcactgtttcatcaacaccaaccctaaaaatacgttggaggctcatcgttcctattcaggcagatgttatcgaggtccgacnnnnnntaaaactacgaacaaaaacccaaaaaacagatcggatacgcatgaggct

SEQ ID NO: 6548 - DNA, 146 bp, Artificial Sequence
  Bisulfite Padlock Probe
  misc_feature 92, 93, 94, 95, 96, 97: n = A,T,C or G
gactggaagagcactgtttcatcaacgccaaccctaaaaatacgttggaggctcatcgttcctattcaggcagatgttatcgaggtccgacnnnnnntaaaactacgaacaaaaacccgaaaaacagatcggatacgcatgaggct

SEQ ID NO: 6549 - DNA, 146 bp, Artificial Sequence
  Bisulfite Padlock Probe
  misc_feature 92, 93, 94, 95, 96, 97: n = A,T,C or G
gactggaagagcactgtttcatcaccatctactcctaaaaaccgttggaggctcatcgttcctattcaggcagatgttatcgaggtccgacnnnnnnaaactattcctacctccaaatcaacacctgatcggatacgcatgaggct

SEQ ID NO: 6550 - DNA, 146 bp, Artificial Sequence
  Bisulfite Padlock Probe
  misc_feature 92, 93, 94, 95, 96, 97: n = A,T,C or G
gactggaagagcactgtttcatcaccatctactcctaaaaaccgttggaggctcatcgttcctattcaggcagatgttatcgaggtccgacnnnnnnaaactattcctacctccgaatcaacacctgatcggatacgcatgaggct

SEQ ID NO: 6551 - DNA, 146 bp, Artificial Sequence
  Bisulfite Padlock Probe
  misc_feature 96, 97, 98, 99, 100, 101: n = A,T,C or G
gactggaagagcactgtttcattaatattaataacaattcaactaacgttggaggctcatcgttcctattcaggcagatgttatcgaggtccgacnnnnnntactattcccaacatcttaaccccagatcggatacgcatgaggct

SEQ ID NO: 6552 - DNA, 146 bp, Artificial Sequence
  Bisulfite Padlock Probe
  misc_feature 96, 97, 98, 99, 100, 101: n = A,T,C or G
gactggaagagcactgtttcattaatattaataacgattcaactaacgttggaggctcatcgttcctattcaggcagatgttatcgaggtccgacnnnnnntactattcccgacatcttaaccccagatcggatacgcatgaggct

SEQ ID NO: 6553 - DNA, 146 bp, Artificial Sequence
  Bisulfite Padlock Probe
  misc_feature 93, 94, 95, 96, 97, 98: n = A,T,C or G
gactggaagagcactgtttcattcctacaaaacacatccaaaacgttggaggctcatcgttcctattcaggcagatgttatcgaggtccgacnnnnnnatatccttacccctatcccaaaatcctcgatcggatacgcatgaggct

SEQ ID NO: 6554 - DNA, 146 bp, Artificial Sequence
  Bisulfite Padlock Probe
  misc_feature 93, 94, 95, 96, 97, 98: n = A,T,C or G
gactggaagagcactgtttcattcctacaaaacgcatccaaaacgttggaggctcatcgttcctattcaggcagatgttatcgaggtccgacnnnnnnatatccttacccctatcccgaaatcctcgatcggatacgcatgaggct

SEQ ID NO: 6555 - DNA, 146 bp, Artificial Sequence
  Bisulfite Padlock Probe
  misc_feature 95, 96, 97, 98, 99, 100: n = A,T,C or G
gactggaagagcactgtttccaaaaacccaaaacctccttcacctcgttggaggctcatcgttcctattcaggcagatgttatcgaggtccgacnnnnnncacaacaaattatattacttttccccgatcggatacgcatgaggct

SEQ ID NO: 6556 - DNA, 146 bp, Artificial Sequence
  Bisulfite Padlock Probe
  misc_feature 94, 95, 96, 97, 98, 99: n = A,T,C or G
gactggaagagcactgtttccaaaaacgctaacaactacatcaacgttggaggctcatcgttcctattcaggcagatgttatcgaggtccgacnnnnnnaaactactataaatccaaaactaaaaagatcggatacgcatgaggct

SEQ ID NO: 6557 - DNA, 146 bp, Artificial Sequence
  Bisulfite Padlock Probe
  misc_feature 94, 95, 96, 97, 98, 99: n = A,T,C or G
gactggaagagcactgtttccaaaaacgctaacaactacgtcaacgttggaggctcatcgttcctattcaggcagatgttatcgaggtccgacnnnnnnaaactactataaatccaaaactaaaaagatcggatacgcatgaggct

SEQ ID NO: 6558 - DNA, 146 bp, Artificial Sequence
  Bisulfite Padlock Probe
  misc_feature 93, 94, 95, 96, 97, 98: n = A,T,C or G
gactggaagagcactgtttccaaaaatcttcctaaaaccctaacgttggaggctcatcgttcctattcaggcagatgttatcgaggtccgacnnnnnnaacgccaaaaacgaaaacaaaataaaaagatcggatacgcatgaggct

SEQ ID NO: 6559 - DNA, 146 bp, Artificial Sequence
  Bisulfite Padlock Probe
  misc_feature 93, 94, 95, 96, 97, 98: n = A,T,C or G
gactggaagagcactgtttccaaaatattacgcttctccaaaacgttggaggctcatcgttcctattcaggcagatgttatcgaggtccgacnnnnnnaaaaacgcaacaaccgatactccaaaacgatcggatacgcatgaggct

SEQ ID NO: 6560 - DNA, 146 bp, Artificial Sequence
  Bisulfite Padlock Probe
  misc_feature 93, 94, 95, 96, 97, 98: n = A,T,C or G
gactggaagagcactgtttccaaaatattacgcttctccgaaacgttggaggctcatcgttcctattcaggcagatgttatcgaggtccgacnnnnnnaaaaacgcaacaaccgatactccgaaacgatcggatacgcatgaggct

SEQ ID NO: 6561 - DNA, 146 bp, Artificial Sequence
  Bisulfite Padlock Probe
  misc_feature 96, 97, 98, 99, 100, 101: n = A,T,C or G
gactggaagagcactgtttccaaaatcctaaattctttaaacacactgttggaggctcatcgttcctattcaggcagatgttatcgaggtccgacnnnnnnatttaatatcttattaaccaatatcgatcggatacgcatgaggct

SEQ ID NO: 6562 - DNA, 146 bp, Artificial Sequence
  Bisulfite Padlock Probe
  misc_feature 96, 97, 98, 99, 100, 101: n = A,T,C or G
gactggaagagcactgtttccaaaatcctaaattctttaaacacactgttggaggctcatcgttcctattcaggcagatgttatcgaggtccgacnnnnnnatttaatatcttattaaccgatatcgatcggatacgcatgaggct

SEQ ID NO: 6563 - DNA, 146 bp, Artificial Sequence
  Bisulfite Padlock Probe
  misc_feature 95, 96, 97, 98, 99, 100: n = A,T,C or G
gactggaagagcactgtttccaaacccataaaactaaccctacaccgttggaggctcatcgttcctattcaggcagatgttatcgaggtccgacnnnnnncacacacacatacaaataacaaccccgatcggatacgcatgaggct

SEQ ID NO: 6564 - DNA, 146 bp, Artificial Sequence
  Bisulfite Padlock Probe
  misc_feature 95, 96, 97, 98, 99, 100: n = A,T,C or G
gactggaagagcactgtttccaaacccgtaaaactaaccctacaccgttggaggctcatcgttcctattcaggcagatgttatcgaggtccgacnnnnnncacgcacacatacaaataacaaccccgatcggatacgcatgaggct

SEQ ID NO: 6565 - DNA, 146 bp, Artificial Sequence
  Bisulfite Padlock Probe
  misc_feature 92, 93, 94, 95, 96, 97: n = A,T,C or G
gactggaagagcactgtttccaaacctaaccaacaccccttcagttggaggctcatcgttcctattcaggcagatgttatcgaggtccgacnnnnnncattaaaaataaactcgcccaactccaaagatcggatacgcatgaggct

SEQ ID NO: 6566 - DNA, 146 bp, Artificial Sequence
  Bisulfite Padlock Probe
  misc_feature 92, 93, 94, 95, 96, 97: n = A,T,C or G
gactggaagagcactgtttccaaactatcaataaaatccacccgttggaggctcatcgttcctattcaggcagatgttatcgaggtccgacnnnnnncacccgactaaataaacgacccacaaaaagatcggatacgcatgaggct

SEQ ID NO: 6567 - DNA, 146 bp, Artificial Sequence
  Bisulfite Padlock Probe
  misc_feature 94, 95, 96, 97, 98, 99: n = A,T,C or G
gactggaagagcactgtttccaaactcctaaacctttccccactcgttggaggctcatcgttcctattcaggcagatgttatcgaggtccgacnnnnnnacaacccacatcctcactaacaattttgatcggatacgcatgaggct

SEQ ID NO: 6568 - DNA, 146 bp, Artificial Sequence
  Bisulfite Padlock Probe
  misc_feature 94, 95, 96, 97, 98, 99: n = A,T,C or G
gactggaagagcactgtttccaaactcctaaacctttccccactcgttggaggctcatcgttcctattcaggcagatgttatcgaggtccgacnnnnnnacaacccacatcctcgctaacaattttgatcggatacgcatgaggct

SEQ ID NO: 6569 - DNA, 146 bp, Artificial Sequence
  Bisulfite Padlock Probe
  misc_feature 96, 97, 98, 99, 100, 101: n = A,T,C or G
gactggaagagcactgtttccaaataaccccaaatctataaaccaccgttggaggctcatcgttcctattcaggcagatgttatcgaggtccgacnnnnnnccaaaaccaccaaataccaactcccgatcggatacgcatgaggct

SEQ ID NO: 6570 - DNA, 146 bp, Artificial Sequence
  Bisulfite Padlock Probe
  misc_feature 96, 97, 98, 99, 100, 101: n = A,T,C or G
gactggaagagcactgtttccaaataaccccaaatctataaaccgccgttggaggctcatcgttcctattcaggcagatgttatcgaggtccgacnnnnnnccaaaaccaccgaataccaactcccgatcggatacgcatgaggct

SEQ ID NO: 6571 - DNA, 146 bp, Artificial Sequence
  Bisulfite Padlock Probe
  misc_feature 94, 95, 96, 97, 98, 99: n = A,T,C or G
gactggaagagcactgtttccaaatacaaccacaacaccaacaccgttggaggctcatcgttcctattcaggcagatgttatcgaggtccgacnnnnnnctacccgacgaccaacacctacaactagatcggatacgcatgaggct

SEQ ID NO: 6572 - DNA, 146 bp, Artificial Sequence
  Bisulfite Padlock Probe
  misc_feature 94, 95, 96, 97, 98, 99: n = A,T,C or G
gactggaagagcactgtttccaaatacaaccgcaacaccaacaccgttggaggctcatcgttcctattcaggcagatgttatcgaggtccgacnnnnnnctacccgacgaccgacacctacaactagatcggatacgcatgaggct

SEQ ID NO: 6573 - DNA, 146 bp, Artificial Sequence
  Bisulfite Padlock Probe
  misc_feature 94, 95, 96, 97, 98, 99: n = A,T,C or G
gactggaagagcactgtttccaaatcttactaccttccttaacccgttggaggctcatcgttcctattcaggcagatgttatcgaggtccgacnnnnnncccaaacaaaaaactctaccacacctcgatcggatacgcatgaggct

SEQ ID NO: 6574 - DNA, 146 bp, Artificial Sequence
  Bisulfite Padlock Probe
  misc_feature 93, 94, 95, 96, 97, 98: n = A,T,C or G
gactggaagagcactgtttccaacacttactacaattacttctcgttggaggctcatcgttcctattcaggcagatgttatcgaggtccgacnnnnnnaaacgacgaaaaactaaccgcaaaaaacgatcggatacgcatgaggct

SEQ ID NO: 6575 - DNA, 146 bp, Artificial Sequence
  Bisulfite Padlock Probe
  misc_feature 94, 95, 96, 97, 98, 99: n = A,T,C or G
gactggaagagcactgtttccaacccacaatccgataaacacaacgttggaggctcatcgttcctattcaggcagatgttatcgaggtccgacnnnnnnaaaacaaccaaaactaaaaccctccccgatcggatacgcatgaggct

SEQ ID NO: 6576 - DNA, 146 bp, Artificial Sequence
  Bisulfite Padlock Probe
  misc_feature 94, 95, 96, 97, 98, 99: n = A,T,C or G
gactggaagagcactgtttccaacccacaatccgataaacgcaacgttggaggctcatcgttcctattcaggcagatgttatcgaggtccgacnnnnnnaaaacaaccaaaactaaaaccctccccgatcggatacgcatgaggct

SEQ ID NO: 6577 - DNA, 146 bp, Artificial Sequence
  Bisulfite Padlock Probe
  misc_feature 96, 97, 98, 99, 100, 101: n = A,T,C or G
gactggaagagcactgtttccaacctaaacaacctcaatatcaacatgttggaggctcatcgttcctattcaggcagatgttatcgaggtccgacnnnnnnaacaaaaacaaccgaaacattacccgatcggatacgcatgaggct

SEQ ID NO: 6578 - DNA, 146 bp, Artificial Sequence
  Bisulfite Padlock Probe
  misc_feature 96, 97, 98, 99, 100, 101: n = A,T,C or G
gactggaagagcactgtttccaacctaaacaacctcaatatcaacatgttggaggctcatcgttcctattcaggcagatgttatcgaggtccgacnnnnnnaacaaaaacaaccgaaacgttacccgatcggatacgcatgaggct

SEQ ID NO: 6579 - DNA, 146 bp, Artificial Sequence
  Bisulfite Padlock Probe
  misc_feature 93, 94, 95, 96, 97, 98: n = A,T,C or G
gactggaagagcactgtttccaacgcttactacaattacttctcgttggaggctcatcgttcctattcaggcagatgttatcgaggtccgacnnnnnnaaacgacgaaaaactaaccgcgaaaaacgatcggatacgcatgaggct

SEQ ID NO: 6580 - DNA, 146 bp, Artificial Sequence
  Bisulfite Padlock Probe
  misc_feature 94, 95, 96, 97, 98, 99: n = A,T,C or G
gactggaagagcactgtttccaactcgaaaacctacgcataaaaagttggaggctcatcgttcctattcaggcagatgttatcgaggtccgacnnnnnnaaaccaacaaatcaactaccatctaccgatcggatacgcatgaggct

SEQ ID NO: 6581 - DNA, 146 bp, Artificial Sequence
  Bisulfite Padlock Probe
  misc_feature 94, 95, 96, 97, 98, 99: n = A,T,C or G
gactggaagagcactgtttccaactcgaaaacctacgcgtaaaaagttggaggctcatcgttcctattcaggcagatgttatcgaggtccgacnnnnnnaaaccaacaaatcgactaccatctaccgatcggatacgcatgaggct

SEQ ID NO: 6582 - DNA, 146 bp, Artificial Sequence
  Bisulfite Padlock Probe
  misc_feature 93, 94, 95, 96, 97, 98: n = A,T,C or G
gactggaagagcactgtttccaatcccatcctctttactcctccgttggaggctcatcgttcctattcaggcagatgttatcgaggtccgacnnnnnnaaaacaccgtctcctccaaaatctcctcgatcggatacgcatgaggct

SEQ ID NO: 6583 - DNA, 146 bp, Artificial Sequence
  Bisulfite Padlock Probe
  misc_feature 93, 94, 95, 96, 97, 98: n = A,T,C or G
gactggaagagcactgtttccaatcccatcctctttactcctccgttggaggctcatcgttcctattcaggcagatgttatcgaggtccgacnnnnnnaaaacaccgtctcctccgaaatctcctcgatcggatacgcatgaggct

SEQ ID NO: 6584 - DNA, 146 bp, Artificial Sequence
  Bisulfite Padlock Probe
  misc_feature 92, 93, 94, 95, 96, 97: n = A,T,C or G
gactggaagagcactgtttccacataataacatataactcctcgttggaggctcatcgttcctattcaggcagatgttatcgaggtccgacnnnnnnatatacgaacgcatcgcactaaccaaaaagatcggatacgcatgaggct

SEQ ID NO: 6585 - DNA, 146 bp, Artificial Sequence
  Bisulfite Padlock Probe
  misc_feature 92, 93, 94, 95, 96, 97: n = A,T,C or G
gactggaagagcactgtttccacataataacgtataactcctcgttggaggctcatcgttcctattcaggcagatgttatcgaggtccgacnnnnnnatatacgaacgcatcgcgctaaccaaaaagatcggatacgcatgaggct

SEQ ID NO: 6586 - DNA, 146 bp, Artificial Sequence
  Bisulfite Padlock Probe
  misc_feature 95, 96, 97, 98, 99, 100: n = A,T,C or G
gactggaagagcactgtttccaccacctctattttcttttcattaagttggaggctcatcgttcctattcaggcagatgttatcgaggtccgacnnnnnnaaaaactacaacaaacactaaaaaccgatcggatacgcatgaggct

SEQ ID NO: 6587 - DNA, 146 bp, Artificial Sequence
  Bisulfite Padlock Probe
  misc_feature 95, 96, 97, 98, 99, 100: n = A,T,C or G
gactggaagagcactgtttccaccccgaaactaccaaactaaacacgttggaggctcatcgttcctattcaggcagatgttatcgaggtccgacnnnnnnaaaaattaataaacacaaactaaaaagatcggatacgcatgaggct

SEQ ID NO: 6588 - DNA, 146 bp, Artificial Sequence
  Bisulfite Padlock Probe
  misc_feature 95, 96, 97, 98, 99, 100: n = A,T,C or G
gactggaagagcactgtttccaccccgaaactaccgaactaaacacgttggaggctcatcgttcctattcaggcagatgttatcgaggtccgacnnnnnnaaaaattaataaacacaaactaaaaagatcggatacgcatgaggct

SEQ ID NO: 6589 - DNA, 146 bp, Artificial Sequence
  Bisulfite Padlock Probe
  misc_feature 95, 96, 97, 98, 99, 100: n = A,T,C or G
gactggaagagcactgtttccaccgcctctattttcttttcattaagttggaggctcatcgttcctattcaggcagatgttatcgaggtccgacnnnnnnaaaaactacaacaaacactaaaaaccgatcggatacgcatgaggct

SEQ ID NO: 6590 - DNA, 146 bp, Artificial Sequence
  Bisulfite Padlock Probe
  misc_feature 96, 97, 98, 99, 100, 101: n = A,T,C or G
gactggaagagcactgtttccacctccacaactttaacaaatacctcgttggaggctcatcgttcctattcaggcagatgttatcgaggtccgacnnnnnnaaataacgtatccccgtcccacctcgatcggatacgcatgaggct

SEQ ID NO: 6591 - DNA, 146 bp, Artificial Sequence
  Bisulfite Padlock Probe
  misc_feature 96, 97, 98, 99, 100, 101: n = A,T,C or G
gactggaagagcactgtttccacctccgcaactttaacaaatacctcgttggaggctcatcgttcctattcaggcagatgttatcgaggtccgacnnnnnnaaataacgtatccccgtcccgcctcgatcggatacgcatgaggct

SEQ ID NO: 6592 - DNA, 146 bp, Artificial Sequence
  Bisulfite Padlock Probe
  misc_feature 93, 94, 95, 96, 97, 98: n = A,T,C or G
gactggaagagcactgtttccacgatcctaaacaaaaacaacccgttggaggctcatcgttcctattcaggcagatgttatcgaggtccgacnnnnnnatcccaaccctacccaaacccaaaaaccgatcggatacgcatgaggct

SEQ ID NO: 6593 - DNA, 146 bp, Artificial Sequence
  Bisulfite Padlock Probe
  misc_feature 93, 94, 95, 96, 97, 98: n = A,T,C or G
gactggaagagcactgtttccacgatcctaaacgaaaacaacccgttggaggctcatcgttcctattcaggcagatgttatcgaggtccgacnnnnnnatcccaaccctacccaaacccaaaaaccgatcggatacgcatgaggct

SEQ ID NO: 6594 - DNA, 146 bp, Artificial Sequence
  Bisulfite Padlock Probe
  misc_feature 94, 95, 96, 97, 98, 99: n = A,T,C or G
gactggaagagcactgtttccacgctaacgaaaacaacctaaaccgttggaggctcatcgttcctattcaggcagatgttatcgaggtccgacnnnnnnacaccaattcaaaaacctaaaccaaaagatcggatacgcatgaggct

SEQ ID NO: 6595 - DNA, 146 bp, Artificial Sequence
  Bisulfite Padlock Probe
  misc_feature 94, 95, 96, 97, 98, 99: n = A,T,C or G
gactggaagagcactgtttccacgctaacgaaaacgacctaaaccgttggaggctcatcgttcctattcaggcagatgttatcgaggtccgacnnnnnnacaccaattcgaaaacctaaaccaaaagatcggatacgcatgaggct

SEQ ID NO: 6596 - DNA, 146 bp, Artificial Sequence
  Bisulfite Padlock Probe
  misc_feature 94, 95, 96, 97, 98, 99: n = A,T,C or G
gactggaagagcactgtttccataacccgacactaccctaatcccgttggaggctcatcgttcctattcaggcagatgttatcgaggtccgacnnnnnnccctaccaaaaataacccgcaaaacccgatcggatacgcatgaggct

SEQ ID NO: 6597 - DNA, 146 bp, Artificial Sequence
  Bisulfite Padlock Probe
  misc_feature 94, 95, 96, 97, 98, 99: n = A,T,C or G
gactggaagagcactgtttccataacccgacgctaccctaatcccgttggaggctcatcgttcctattcaggcagatgttatcgaggtccgacnnnnnnccctaccaaaaataacccgcgaaacccgatcggatacgcatgaggct

SEQ ID NO: 6598 - DNA, 146 bp, Artificial Sequence
  Bisulfite Padlock Probe
  misc_feature 92, 93, 94, 95, 96, 97: n = A,T,C or G
gactggaagagcactgtttccataaccctaacgacaacaatacgttggaggctcatcgttcctattcaggcagatgttatcgaggtccgacnnnnnntcaacaccaaaaacaaaataaaacacaacgatcggatacgcatgaggct

SEQ ID NO: 6599 - DNA, 146 bp, Artificial Sequence
  Bisulfite Padlock Probe
  misc_feature 92, 93, 94, 95, 96, 97: n = A,T,C or G
gactggaagagcactgtttccataaccctaacgacaacgatacgttggaggctcatcgttcctattcaggcagatgttatcgaggtccgacnnnnnntcaacgccaaaaacaaaataaaacacaacgatcggatacgcatgaggct

SEQ ID NO: 6600 - DNA, 146 bp, Artificial Sequence
  Bisulfite Padlock Probe
  misc_feature 96, 97, 98, 99, 100, 101: n = A,T,C or G
gactggaagagcactgtttccataactatcacttcatccaaaaccaagttggaggctcatcgttcctattcaggcagatgttatcgaggtccgacnnnnnntccaaaccaaactacaactaaaaccgatcggatacgcatgaggct

SEQ ID NO: 6601 - DNA, 146 bp, Artificial Sequence
  Bisulfite Padlock Probe
  misc_feature 96, 97, 98, 99, 100, 101: n = A,T,C or G
gactggaagagcactgtttccataactatcacttcgtccaaaaccaagttggaggctcatcgttcctattcaggcagatgttatcgaggtccgacnnnnnntccgaaccaaactacaactaaaaccgatcggatacgcatgaggct

SEQ ID NO: 6602 - DNA, 146 bp, Artificial Sequence
  Bisulfite Padlock Probe
  misc_feature 93, 94, 95, 96, 97, 98: n = A,T,C or G
gactggaagagcactgtttccatatttctataaaacacacaactgttggaggctcatcgttcctattcaggcagatgttatcgaggtccgacnnnnnnacccccaaacactatactaaaccaaaaagatcggatacgcatgaggct

SEQ ID NO: 6603 - DNA, 146 bp, Artificial Sequence
  Bisulfite Padlock Probe
  misc_feature 94, 95, 96, 97, 98, 99: n = A,T,C or G
gactggaagagcactgtttccatcacccaaactcccgaaaacaacgttggaggctcatcgttcctattcaggcagatgttatcgaggtccgacnnnnnnaaaaatataataaatctccccaaaaacgatcggatacgcatgaggct

SEQ ID NO: 6604 - DNA, 146 bp, Artificial Sequence
  Bisulfite Padlock Probe
  misc_feature 94, 95, 96, 97, 98, 99: n = A,T,C or G
gactggaagagcactgtttccatcacccaaactcccgaaaacgacgttggaggctcatcgttcctattcaggcagatgttatcgaggtccgacnnnnnnaaaaatataataaatctccccaaaaacgatcggatacgcatgaggct

SEQ ID NO: 6605 - DNA, 146 bp, Artificial Sequence
  Bisulfite Padlock Probe
  misc_feature 94, 95, 96, 97, 98, 99: n = A,T,C or G
gactggaagagcactgtttccatctactctatcaccaaaaacaccgttggaggctcatcgttcctattcaggcagatgttatcgaggtccgacnnnnnncaatctaactatccaaattaaaaccccgatcggatacgcatgaggct

SEQ ID NO: 6606 - DNA, 146 bp, Artificial Sequence
  Bisulfite Padlock Probe
  misc_feature 94, 95, 96, 97, 98, 99: n = A,T,C or G
gactggaagagcactgtttccatctactctatcgccaaaaacaccgttggaggctcatcgttcctattcaggcagatgttatcgaggtccgacnnnnnncaatctaactatccaaattaaaaccccgatcggatacgcatgaggct

SEQ ID NO: 6607 - DNA, 146 bp, Artificial Sequence
  Bisulfite Padlock Probe
  misc_feature 94, 95, 96, 97, 98, 99: n = A,T,C or G
gactggaagagcactgtttcccaaacaataaccaaaatacttaacgttggaggctcatcgttcctattcaggcagatgttatcgaggtccgacnnnnnncaactaaacaaaatttattcctctctcgatcggatacgcatgaggct

SEQ ID NO: 6608 - DNA, 146 bp, Artificial Sequence
  Bisulfite Padlock Probe
  misc_feature 94, 95, 96, 97, 98, 99: n = A,T,C or G
gactggaagagcactgtttcccaaacaataaccgaaatacttaacgttggaggctcatcgttcctattcaggcagatgttatcgaggtccgacnnnnnncaactaaacaaaatttattcctctctcgatcggatacgcatgaggct

SEQ ID NO: 6609 - DNA, 146 bp, Artificial Sequence
  Bisulfite Padlock Probe
  misc_feature 92, 93, 94, 95, 96, 97: n = A,T,C or G
gactggaagagcactgtttcccaaactcacttacttcctccctgttggaggctcatcgttcctattcaggcagatgttatcgaggtccgacnnnnnnataaaattctttttccaattctaaaacttgatcggatacgcatgaggct

SEQ ID NO: 6610 - DNA, 146 bp, Artificial Sequence
  Bisulfite Padlock Probe
  misc_feature 92, 93, 94, 95, 96, 97: n = A,T,C or G
gactggaagagcactgtttcccaaactcgcttacttcctccctgttggaggctcatcgttcctattcaggcagatgttatcgaggtccgacnnnnnnataaaattctttttccaattctaaaacttgatcggatacgcatgaggct

SEQ ID NO: 6611 - DNA, 146 bp, Artificial Sequence
  Bisulfite Padlock Probe
  misc_feature 96, 97, 98, 99, 100, 101: n = A,T,C or G
gactggaagagcactgtttcccaaatatactatacaatttcccaaacgttggaggctcatcgttcctattcaggcagatgttatcgaggtccgacnnnnnnccgacctcgcacctccattaactacgatcggatacgcatgaggct

SEQ ID NO: 6612 - DNA, 146 bp, Artificial Sequence
  Bisulfite Padlock Probe
  misc_feature 96, 97, 98, 99, 100, 101: n = A,T,C or G
gactggaagagcactgtttcccaaatatactatacgatttcccaaacgttggaggctcatcgttcctattcaggcagatgttatcgaggtccgacnnnnnnccgacctcgcgcctccattaactacgatcggatacgcatgaggct

SEQ ID NO: 6613 - DNA, 146 bp, Artificial Sequence
  Bisulfite Padlock Probe
  misc_feature 92, 93, 94, 95, 96, 97: n = A,T,C or G
gactggaagagcactgtttcccaactcttcccaaaataaccttgttggaggctcatcgttcctattcaggcagatgttatcgaggtccgacnnnnnntctcaccccaaacataaattatttaaaccgatcggatacgcatgaggct

SEQ ID NO: 6614 - DNA, 146 bp, Artificial Sequence
  Bisulfite Padlock Probe
  misc_feature 92, 93, 94, 95, 96, 97: n = A,T,C or G
gactggaagagcactgtttcccacaaaacacccttaaacctccgttggaggctcatcgttcctattcaggcagatgttatcgaggtccgacnnnnnnaaaaataaactaaaaccgacaaaatccacgatcggatacgcatgaggct

SEQ ID NO: 6615 - DNA, 146 bp, Artificial Sequence
  Bisulfite Padlock Probe
  misc_feature 92, 93, 94, 95, 96, 97: n = A,T,C or G
gactggaagagcactgtttcccacaaaacacccttaaacctccgttggaggctcatcgttcctattcaggcagatgttatcgaggtccgacnnnnnnaaaaataaactaaaaccgacgaaatccacgatcggatacgcatgaggct

SEQ ID NO: 6616 - DNA, 146 bp, Artificial Sequence
  Bisulfite Padlock Probe
  misc_feature 96, 97, 98, 99, 100, 101: n = A,T,C or G
gactggaagagcactgtttcccacccactcttaaaatcaaaacacccgttggaggctcatcgttcctattcaggcagatgttatcgaggtccgacnnnnnnctacctccccaaacacctaaaacaagatcggatacgcatgaggct

SEQ ID NO: 6617 - DNA, 146 bp, Artificial Sequence
  Bisulfite Padlock Probe
  misc_feature 96, 97, 98, 99, 100, 101: n = A,T,C or G
gactggaagagcactgtttcccacccactcttaaaatcaaaacacccgttggaggctcatcgttcctattcaggcagatgttatcgaggtccgacnnnnnnctacctccccaaacgcctaaaacaagatcggatacgcatgaggct

SEQ ID NO: 6618 - DNA, 146 bp, Artificial Sequence
  Bisulfite Padlock Probe
  misc_feature 92, 93, 94, 95, 96, 97: n = A,T,C or G
gactggaagagcactgtttcccataaacgtacgaaaaacaaccgttggaggctcatcgttcctattcaggcagatgttatcgaggtccgacnnnnnnaaaaacactaaataatcaataactccaacgatcggatacgcatgaggct

SEQ ID NO: 6619 - DNA, 146 bp, Artificial Sequence
  Bisulfite Padlock Probe
  misc_feature 92, 93, 94, 95, 96, 97: n = A,T,C or G
gactggaagagcactgtttcccataaacgtacgaaaaacgaccgttggaggctcatcgttcctattcaggcagatgttatcgaggtccgacnnnnnnaaaaacgctaaataatcaataactccaacgatcggatacgcatgaggct

SEQ ID NO: 6620 - DNA, 146 bp, Artificial Sequence
  Bisulfite Padlock Probe
  misc_feature 96, 97, 98, 99, 100, 101: n = A,T,C or G
gactggaagagcactgtttccccaaacattactctaaactcaaaaacgttggaggctcatcgttcctattcaggcagatgttatcgaggtccgacnnnnnnattctaaccctaacccaaattccacgatcggatacgcatgaggct

SEQ ID NO: 6621 - DNA, 146 bp, Artificial Sequence
  Bisulfite Padlock Probe
  misc_feature 92, 93, 94, 95, 96, 97: n = A,T,C or G
gactggaagagcactgtttccccacgaacacaaataaacaaaagttggaggctcatcgttcctattcaggcagatgttatcgaggtccgacnnnnnnaaaaacaaaacaataacaaaaacaaaaacgatcggatacgcatgaggct

SEQ ID NO: 6622 - DNA, 146 bp, Artificial Sequence
  Bisulfite Padlock Probe
  misc_feature 92, 93, 94, 95, 96, 97: n = A,T,C or G
gactggaagagcactgtttccccacgaacacaaataaacgaaagttggaggctcatcgttcctattcaggcagatgttatcgaggtccgacnnnnnnaaaaacgaaacaataacaaaaacaaaaacgatcggatacgcatgaggct

SEQ ID NO: 6623 - DNA, 146 bp, Artificial Sequence
  Bisulfite Padlock Probe
  misc_feature 94, 95, 96, 97, 98, 99: n = A,T,C or G
gactggaagagcactgtttccccatcccaaccccatcaaattactgttggaggctcatcgttcctattcaggcagatgttatcgaggtccgacnnnnnnaatcaacccctatttctacccccacccgatcggatacgcatgaggct

SEQ ID NO: 6624 - DNA, 146 bp, Artificial Sequence
  Bisulfite Padlock Probe
  misc_feature 92, 93, 94, 95, 96, 97: n = A,T,C or G
gactggaagagcactgtttcccccaaaataaacttcctacctcgttggaggctcatcgttcctattcaggcagatgttatcgaggtccgacnnnnnncccttacactaaaaataaaataaaacctcgatcggatacgcatgaggct

SEQ ID NO: 6625 - DNA, 146 bp, Artificial Sequence
  Bisulfite Padlock Probe
  misc_feature 92, 93, 94, 95, 96, 97: n = A,T,C or G
gactggaagagcactgtttcccccgaaataaacttcctacctcgttggaggctcatcgttcctattcaggcagatgttatcgaggtccgacnnnnnncccttacactaaaaataaaataaaacctcgatcggatacgcatgaggct

SEQ ID NO: 6626 - DNA, 146 bp, Artificial Sequence
  Bisulfite Padlock Probe
  misc_feature 95, 96, 97, 98, 99, 100: n = A,T,C or G
gactggaagagcactgtttccccctacaaactcacctactaaatctgttggaggctcatcgttcctattcaggcagatgttatcgaggtccgacnnnnnnaaaccgtctttacgaaaacaacccccgatcggatacgcatgaggct

SEQ ID NO: 6627 - DNA, 146 bp, Artificial Sequence
  Bisulfite Padlock Probe
  misc_feature 95, 96, 97, 98, 99, 100: n = A,T,C or G
gactggaagagcactgtttccccctacgaactcacctactaaatctgttggaggctcatcgttcctattcaggcagatgttatcgaggtccgacnnnnnnaaaccgtctttacgaaaacgacccccgatcggatacgcatgaggct

SEQ ID NO: 6628 - DNA, 146 bp, Artificial Sequence
  Bisulfite Padlock Probe
  misc_feature 96, 97, 98, 99, 100, 101: n = A,T,C or G
gactggaagagcactgtttccccctccctaaccctaaacctacaaaagttggaggctcatcgttcctattcaggcagatgttatcgaggtccgacnnnnnnaaaaaccccttcccccacctcttccgatcggatacgcatgaggct

SEQ ID NO: 6629 - DNA, 146 bp, Artificial Sequence
  Bisulfite Padlock Probe
  misc_feature 95, 96, 97, 98, 99, 100: n = A,T,C or G
gactggaagagcactgtttcccccttaccaactctaaacaaaattcgttggaggctcatcgttcctattcaggcagatgttatcgaggtccgacnnnnnnaaaaacgaattaaatcaattacaaacgatcggatacgcatgaggct

SEQ ID NO: 6630 - DNA, 146 bp, Artificial Sequence
  Bisulfite Padlock Probe
  misc_feature 95, 96, 97, 98, 99, 100: n = A,T,C or G
gactggaagagcactgtttcccccttaccaactctaaacaaaattcgttggaggctcatcgttcctattcaggcagatgttatcgaggtccgacnnnnnnaaaaacgaattaaatcaattacgaacgatcggatacgcatgaggct

SEQ ID NO: 6631 - DNA, 146 bp, Artificial Sequence
  Bisulfite Padlock Probe
  misc_feature 92, 93, 94, 95, 96, 97: n = A,T,C or G
gactggaagagcactgtttccccgaacactattctaaaacctcgttggaggctcatcgttcctattcaggcagatgttatcgaggtccgacnnnnnnaaataaattacccttaacaccttaaaaacgatcggatacgcatgaggct

SEQ ID NO: 6632 - DNA, 146 bp, Artificial Sequence
  Bisulfite Padlock Probe
  misc_feature 92, 93, 94, 95, 96, 97: n = A,T,C or G
gactggaagagcactgtttccccgaacgctattctaaaacctcgttggaggctcatcgttcctattcaggcagatgttatcgaggtccgacnnnnnnaaataaattacccttaacgccttaaaaacgatcggatacgcatgaggct

SEQ ID NO: 6633 - DNA, 146 bp, Artificial Sequence
  Bisulfite Padlock Probe
  misc_feature 95, 96, 97, 98, 99, 100: n = A,T,C or G
gactggaagagcactgtttcccctcgactataaaacatcctaaaaagttggaggctcatcgttcctattcaggcagatgttatcgaggtccgacnnnnnntcctacaacctctccaaaacccctccgatcggatacgcatgaggct

SEQ ID NO: 6634 - DNA, 146 bp, Artificial Sequence
  Bisulfite Padlock Probe
  misc_feature 95, 96, 97, 98, 99, 100: n = A,T,C or G
gactggaagagcactgtttcccctcgactataaaacgtcctaaaaagttggaggctcatcgttcctattcaggcagatgttatcgaggtccgacnnnnnntcctacgacctctccaaaacccctccgatcggatacgcatgaggct

SEQ ID NO: 6635 - DNA, 146 bp, Artificial Sequence
  Bisulfite Padlock Probe
  misc_feature 93, 94, 95, 96, 97, 98: n = A,T,C or G
gactggaagagcactgtttccccttacctaaccctaactaaaaagttggaggctcatcgttcctattcaggcagatgttatcgaggtccgacnnnnnnccaacctctccccaaaatcctcaaacttgatcggatacgcatgaggct

SEQ ID NO: 6636 - DNA, 146 bp, Artificial Sequence
  Bisulfite Padlock Probe
  misc_feature 93, 94, 95, 96, 97, 98: n = A,T,C or G
gactggaagagcactgtttccccttacctaaccctaactaaaaagttggaggctcatcgttcctattcaggcagatgttatcgaggtccgacnnnnnnccaacctctccccgaaatcctcaaacttgatcggatacgcatgaggct

SEQ ID NO: 6637 - DNA, 146 bp, Artificial Sequence
  Bisulfite Padlock Probe
  misc_feature 94, 95, 96, 97, 98, 99: n = A,T,C or G
gactggaagagcactgtttcccgaaatcataaccaacctaaactagttggaggctcatcgttcctattcaggcagatgttatcgaggtccgacnnnnnncaccgaatcaactcgcaatcctactacgatcggatacgcatgaggct

SEQ ID NO: 6638 - DNA, 146 bp, Artificial Sequence
  Bisulfite Padlock Probe
  misc_feature 94, 95, 96, 97, 98, 99: n = A,T,C or G
gactggaagagcactgtttcccgaaatcataaccgacctaaactagttggaggctcatcgttcctattcaggcagatgttatcgaggtccgacnnnnnncaccgaatcaactcgcgatcctactacgatcggatacgcatgaggct

SEQ ID NO: 6639 - DNA, 146 bp, Artificial Sequence
  Bisulfite Padlock Probe
  misc_feature 93, 94, 95, 96, 97, 98: n = A,T,C or G
gactggaagagcactgtttcccgaacaatccaaacgaccaaaacgttggaggctcatcgttcctattcaggcagatgttatcgaggtccgacnnnnnntccaaatcccataaataaaataattaacgatcggatacgcatgaggct

SEQ ID NO: 6640 - DNA, 146 bp, Artificial Sequence
  Bisulfite Padlock Probe
  misc_feature 93, 94, 95, 96, 97, 98: n = A,T,C or G
gactggaagagcactgtttcccgaacaatccaaacgaccgaaacgttggaggctcatcgttcctattcaggcagatgttatcgaggtccgacnnnnnntccaaatcccataaataaaataattaacgatcggatacgcatgaggct

SEQ ID NO: 6641 - DNA, 146 bp, Artificial Sequence
  Bisulfite Padlock Probe
  misc_feature 92, 93, 94, 95, 96, 97: n = A,T,C or G
gactggaagagcactgtttcccgaaccaaaaaataactaaaaagttggaggctcatcgttcctattcaggcagatgttatcgaggtccgacnnnnnnctactccaaaccctccaattaataatactgatcggatacgcatgaggct

SEQ ID NO: 6642 - DNA, 146 bp, Artificial Sequence
  Bisulfite Padlock Probe
  misc_feature 92, 93, 94, 95, 96, 97: n = A,T,C or G
gactggaagagcactgtttcccgaaccgaaaaataactaaaaagttggaggctcatcgttcctattcaggcagatgttatcgaggtccgacnnnnnnctactccgaaccctccaattaataatactgatcggatacgcatgaggct

SEQ ID NO: 6643 - DNA, 146 bp, Artificial Sequence
  Bisulfite Padlock Probe
  misc_feature 96, 97, 98, 99, 100, 101: n = A,T,C or G
gactggaagagcactgtttcccgaacttcccactacaaatataaaaagttggaggctcatcgttcctattcaggcagatgttatcgaggtccgacnnnnnnaaaaacccaaaactaaccctaaaaagatcggatacgcatgaggct

SEQ ID NO: 6644 - DNA, 146 bp, Artificial Sequence
  Bisulfite Padlock Probe
  misc_feature 96, 97, 98, 99, 100, 101: n = A,T,C or G
gactggaagagcactgtttcccgaacttcccgctacaaatataaaaagttggaggctcatcgttcctattcaggcagatgttatcgaggtccgacnnnnnnaaaaacccgaaactaaccctaaaaagatcggatacgcatgaggct

SEQ ID NO: 6645 - DNA, 146 bp, Artificial Sequence
  Bisulfite Padlock Probe
  misc_feature 92, 93, 94, 95, 96, 97: n = A,T,C or G
gactggaagagcactgtttcccgactcttcccaaaataaccttgttggaggctcatcgttcctattcaggcagatgttatcgaggtccgacnnnnnntctcaccccaaacgtaaattatttaaaccgatcggatacgcatgaggct

SEQ ID NO: 6646 - DNA, 146 bp, Artificial Sequence
  Bisulfite Padlock Probe
  misc_feature 92, 93, 94, 95, 96, 97: n = A,T,C or G
gactggaagagcactgtttcccgatacaaataacaacaaaaacgttggaggctcatcgttcctattcaggcagatgttatcgaggtccgacnnnnnncaaaatccccaccaaatcaattccaaaaagatcggatacgcatgaggct

SEQ ID NO: 6647 - DNA, 146 bp, Artificial Sequence
  Bisulfite Padlock Probe
  misc_feature 92, 93, 94, 95, 96, 97: n = A,T,C or G
gactggaagagcactgtttcccgatacaaataacgacaaaaacgttggaggctcatcgttcctattcaggcagatgttatcgaggtccgacnnnnnncaaaatccccaccaaatcaattccaaaaagatcggatacgcatgaggct

SEQ ID NO: 6648 - DNA, 146 bp, Artificial Sequence
  Bisulfite Padlock Probe
  misc_feature 92, 93, 94, 95, 96, 97: n = A,T,C or G
gactggaagagcactgtttcccgatccccaccttacaaaaaacgttggaggctcatcgttcctattcaggcagatgttatcgaggtccgacnnnnnncgaacgaaaactcaaacccctaacctaacgatcggatacgcatgaggct

SEQ ID NO: 6649 - DNA, 146 bp, Artificial Sequence
  Bisulfite Padlock Probe
  misc_feature 92, 93, 94, 95, 96, 97: n = A,T,C or G
gactggaagagcactgtttcccgatccccaccttacgaaaaacgttggaggctcatcgttcctattcaggcagatgttatcgaggtccgacnnnnnncgaacgaaaactcgaacccctaacctaacgatcggatacgcatgaggct

SEQ ID NO: 6650 - DNA, 146 bp, Artificial Sequence
  Bisulfite Padlock Probe
  misc_feature 93, 94, 95, 96, 97, 98: n = A,T,C or G
gactggaagagcactgtttcccgcaaaaaccccaaaactcaaaagttggaggctcatcgttcctattcaggcagatgttatcgaggtccgacnnnnnnacgctaccgaaaaacaaaaccaacaaacgatcggatacgcatgaggct

SEQ ID NO: 6651 - DNA, 146 bp, Artificial Sequence
  Bisulfite Padlock Probe
  misc_feature 93, 94, 95, 96, 97, 98: n = A,T,C or G
gactggaagagcactgtttcccgcaaaaaccccgaaactcaaaagttggaggctcatcgttcctattcaggcagatgttatcgaggtccgacnnnnnnacgctaccgaaaaacaaaaccgacaaacgatcggatacgcatgaggct

SEQ ID NO: 6652 - DNA, 146 bp, Artificial Sequence
  Bisulfite Padlock Probe
  misc_feature 92, 93, 94, 95, 96, 97: n = A,T,C or G
gactggaagagcactgtttcccgccccaaacgaatccaaatacgttggaggctcatcgttcctattcaggcagatgttatcgaggtccgacnnnnnnccaccgaccaaaaatacttaaaatcttatgatcggatacgcatgaggct

SEQ ID NO: 6653 - DNA, 146 bp, Artificial Sequence
  Bisulfite Padlock Probe
  misc_feature 92, 93, 94, 95, 96, 97: n = A,T,C or G
gactggaagagcactgtttcccgccccaaacgaatccgaatacgttggaggctcatcgttcctattcaggcagatgttatcgaggtccgacnnnnnnccaccgaccgaaaatacttaaaatcttatgatcggatacgcatgaggct

SEQ ID NO: 6654 - DNA, 146 bp, Artificial Sequence
  Bisulfite Padlock Probe
  misc_feature 96, 97, 98, 99, 100, 101: n = A,T,C or G
gactggaagagcactgtttccctaaaaactacaaaaaccctacaaacgttggaggctcatcgttcctattcaggcagatgttatcgaggtccgacnnnnnnaaatacttctaccaatttctcctccgatcggatacgcatgaggct

SEQ ID NO: 6655 - DNA, 146 bp, Artificial Sequence
  Bisulfite Padlock Probe
  misc_feature 96, 97, 98, 99, 100, 101: n = A,T,C or G
gactggaagagcactgtttccctaaaaactacaaaaaccctacaaacgttggaggctcatcgttcctattcaggcagatgttatcgaggtccgacnnnnnnaaatacttctaccgatttctcctccgatcggatacgcatgaggct

SEQ ID NO: 6656 - DNA, 146 bp, Artificial Sequence
  Bisulfite Padlock Probe
  misc_feature 94, 95, 96, 97, 98, 99: n = A,T,C or G
gactggaagagcactgtttccctaacacgaaaacaaaacgcactagttggaggctcatcgttcctattcaggcagatgttatcgaggtccgacnnnnnnaaaacaaaaaacaactcatctcaaaacgatcggatacgcatgaggct

SEQ ID NO: 6657 - DNA, 146 bp, Artificial Sequence
  Bisulfite Padlock Probe
  misc_feature 94, 95, 96, 97, 98, 99: n = A,T,C or G
gactggaagagcactgtttccctaacacgaaaacaaaacgcgctagttggaggctcatcgttcctattcaggcagatgttatcgaggtccgacnnnnnnaaaacgaaaaacaactcatctcaaaacgatcggatacgcatgaggct

SEQ ID NO: 6658 - DNA, 146 bp, Artificial Sequence
  Bisulfite Padlock Probe
  misc_feature 92, 93, 94, 95, 96, 97: n = A,T,C or G
gactggaagagcactgtttccctaacgcatatacccatccactgttggaggctcatcgttcctattcaggcagatgttatcgaggtccgacnnnnnnaaaaacgacccaaaatttaacaatcccctgatcggatacgcatgaggct

SEQ ID NO: 6659 - DNA, 146 bp, Artificial Sequence
  Bisulfite Padlock Probe
  misc_feature 92, 93, 94, 95, 96, 97: n = A,T,C or G
gactggaagagcactgtttccctaacgcatatacccatccgctgttggaggctcatcgttcctattcaggcagatgttatcgaggtccgacnnnnnnaaaaacgacccgaaatttaacaatcccctgatcggatacgcatgaggct

SEQ ID NO: 6660 - DNA, 146 bp, Artificial Sequence
  Bisulfite Padlock Probe
  misc_feature 94, 95, 96, 97, 98, 99: n = A,T,C or G
gactggaagagcactgtttccctaacttcaactaccaaaaactctgttggaggctcatcgttcctattcaggcagatgttatcgaggtccgacnnnnnntaaactaaataatacaaactaaaaatcgatcggatacgcatgaggct

SEQ ID NO: 6661 - DNA, 146 bp, Artificial Sequence
  Bisulfite Padlock Probe
  misc_feature 94, 95, 96, 97, 98, 99: n = A,T,C or G
gactggaagagcactgtttccctaatcccctaaactttaaattaagttggaggctcatcgttcctattcaggcagatgttatcgaggtccgacnnnnnnaaatcactaaaatcaaacccttaacccgatcggatacgcatgaggct

SEQ ID NO: 6662 - DNA, 146 bp, Artificial Sequence
  Bisulfite Padlock Probe
  misc_feature 96, 97, 98, 99, 100, 101: n = A,T,C or G
gactggaagagcactgtttccctacaaaatccctttaaacataacccgttggaggctcatcgttcctattcaggcagatgttatcgaggtccgacnnnnnnaaacctcctaaaactcccccaacccgatcggatacgcatgaggct

SEQ ID NO: 6663 - DNA, 146 bp, Artificial Sequence
  Bisulfite Padlock Probe
  misc_feature 96, 97, 98, 99, 100, 101: n = A,T,C or G
gactggaagagcactgtttccctacgaaatccctttaaacataacccgttggaggctcatcgttcctattcaggcagatgttatcgaggtccgacnnnnnnaaacctcctaaaactcccccaacccgatcggatacgcatgaggct

SEQ ID NO: 6664 - DNA, 146 bp, Artificial Sequence
  Bisulfite Padlock Probe
  misc_feature 92, 93, 94, 95, 96, 97: n = A,T,C or G
gactggaagagcactgtttccctatctccccaactaaccctacgttggaggctcatcgttcctattcaggcagatgttatcgaggtccgacnnnnnnaatcctatctaaacattcccgcaactcccgatcggatacgcatgaggct

SEQ ID NO: 6665 - DNA, 146 bp, Artificial Sequence
  Bisulfite Padlock Probe
  misc_feature 92, 93, 94, 95, 96, 97: n = A,T,C or G
gactggaagagcactgtttccctatctccccaactaaccctacgttggaggctcatcgttcctattcaggcagatgttatcgaggtccgacnnnnnnaatcctatctaaacattcccgcgactcccgatcggatacgcatgaggct

SEQ ID NO: 6666 - DNA, 146 bp, Artificial Sequence
  Bisulfite Padlock Probe
  misc_feature 92, 93, 94, 95, 96, 97: n = A,T,C or G
gactggaagagcactgtttccctcaaaacactttcaacctcaagttggaggctcatcgttcctattcaggcagatgttatcgaggtccgacnnnnnnaaacctcaacctccttcaaaaccaaaaccgatcggatacgcatgaggct

SEQ ID NO: 6667 - DNA, 146 bp, Artificial Sequence
  Bisulfite Padlock Probe
  misc_feature 92, 93, 94, 95, 96, 97: n = A,T,C or G
gactggaagagcactgtttccctcaaaacactttcaacctcaagttggaggctcatcgttcctattcaggcagatgttatcgaggtccgacnnnnnnaaacctcaacctccttcgaaaccaaaaccgatcggatacgcatgaggct

SEQ ID NO: 6668 - DNA, 146 bp, Artificial Sequence
  Bisulfite Padlock Probe
  misc_feature 92, 93, 94, 95, 96, 97: n = A,T,C or G
gactggaagagcactgtttccctccctccaccaataattccttgttggaggctcatcgttcctattcaggcagatgttatcgaggtccgacnnnnnnaaaaccaaaatacgcgtaacgacccaaacgatcggatacgcatgaggct

SEQ ID NO: 6669 - DNA, 146 bp, Artificial Sequence
  Bisulfite Padlock Probe
  misc_feature 92, 93, 94, 95, 96, 97: n = A,T,C or G
gactggaagagcactgtttccctccctccaccgataattccttgttggaggctcatcgttcctattcaggcagatgttatcgaggtccgacnnnnnnaaaaccaaaatacgcgtaacgacccgaacgatcggatacgcatgaggct

SEQ ID NO: 6670 - DNA, 146 bp, Artificial Sequence
  Bisulfite Padlock Probe
  misc_feature 93, 94, 95, 96, 97, 98: n = A,T,C or G
gactggaagagcactgtttccctcgaccaccctcccaataaaatgttggaggctcatcgttcctattcaggcagatgttatcgaggtccgacnnnnnnacacataatctcataaatcaacaacacagatcggatacgcatgaggct

SEQ ID NO: 6671 - DNA, 146 bp, Artificial Sequence
  Bisulfite Padlock Probe
  misc_feature 93, 94, 95, 96, 97, 98: n = A,T,C or G
gactggaagagcactgtttccctcgaccaccctcccgataaaatgttggaggctcatcgttcctattcaggcagatgttatcgaggtccgacnnnnnnacacataatctcgtaaatcaacaacacagatcggatacgcatgaggct

SEQ ID NO: 6672 - DNA, 146 bp, Artificial Sequence
  Bisulfite Padlock Probe
  misc_feature 96, 97, 98, 99, 100, 101: n = A,T,C or G
gactggaagagcactgtttcccttataatctattaaattaactaatagttggaggctcatcgttcctattcaggcagatgttatcgaggtccgacnnnnnnaaaaatcccaaaatccgaaacgcacgatcggatacgcatgaggct

SEQ ID NO: 6673 - DNA, 146 bp, Artificial Sequence
  Bisulfite Padlock Probe
  misc_feature 96, 97, 98, 99, 100, 101: n = A,T,C or G
gactggaagagcactgtttcccttataatctattaaattaactaatagttggaggctcatcgttcctattcaggcagatgttatcgaggtccgacnnnnnnaaaaatcccaaaatccgaaacgcgcgatcggatacgcatgaggct

SEQ ID NO: 6674 - DNA, 146 bp, Artificial Sequence
  Bisulfite Padlock Probe
  misc_feature 93, 94, 95, 96, 97, 98: n = A,T,C or G
gactggaagagcactgtttcccttctctttccccaccaactcctgttggaggctcatcgttcctattcaggcagatgttatcgaggtccgacnnnnnnacaaataaactacgaacccaactaatacgatcggatacgcatgaggct

SEQ ID NO: 6675 - DNA, 146 bp, Artificial Sequence
  Bisulfite Padlock Probe
  misc_feature 93, 94, 95, 96, 97, 98: n = A,T,C or G
gactggaagagcactgtttcccttctctttccccaccaactcctgttggaggctcatcgttcctattcaggcagatgttatcgaggtccgacnnnnnnacaaataaactacgaacccgactaatacgatcggatacgcatgaggct

SEQ ID NO: 6676 - DNA, 146 bp, Artificial Sequence
  Bisulfite Padlock Probe
  misc_feature 95, 96, 97, 98, 99, 100: n = A,T,C or G
gactggaagagcactgtttccgaaaacccaaaacctccttcacctcgttggaggctcatcgttcctattcaggcagatgttatcgaggtccgacnnnnnncgcaacaaattatattacttttccccgatcggatacgcatgaggct

SEQ ID NO: 6677 - DNA, 146 bp, Artificial Sequence
  Bisulfite Padlock Probe
  misc_feature 93, 94, 95, 96, 97, 98: n = A,T,C or G
gactggaagagcactgtttccgaaaatcttcctaaaaccctaacgttggaggctcatcgttcctattcaggcagatgttatcgaggtccgacnnnnnnaacgccaaaaacgaaaacgaaataaaaagatcggatacgcatgaggct

SEQ ID NO: 6678 - DNA, 146 bp, Artificial Sequence
  Bisulfite Padlock Probe
  misc_feature 92, 93, 94, 95, 96, 97: n = A,T,C or G
gactggaagagcactgtttccgaaacccgctaaaatcaaaatcgttggaggctcatcgttcctattcaggcagatgttatcgaggtccgacnnnnnntccacgacaacacgcactaataaatacccgatcggatacgcatgaggct

SEQ ID NO: 6679 - DNA, 146 bp, Artificial Sequence
  Bisulfite Padlock Probe
  misc_feature 92, 93, 94, 95, 96, 97: n = A,T,C or G
gactggaagagcactgtttccgaaacccgctaaaatcgaaatcgttggaggctcatcgttcctattcaggcagatgttatcgaggtccgacnnnnnntccacgacaacacgcgctaataaatacccgatcggatacgcatgaggct

SEQ ID NO: 6680 - DNA, 146 bp, Artificial Sequence
  Bisulfite Padlock Probe
  misc_feature 93, 94, 95, 96, 97, 98: n = A,T,C or G
gactggaagagcactgtttccgaaccgctacacctaaacactacgttggaggctcatcgttcctattcaggcagatgttatcgaggtccgacnnnnnnaaaacgtcatctactccccaaacttcccgatcggatacgcatgaggct

SEQ ID NO: 6681 - DNA, 146 bp, Artificial Sequence
  Bisulfite Padlock Probe
  misc_feature 93, 94, 95, 96, 97, 98: n = A,T,C or G
gactggaagagcactgtttccgaaccgctacgcctaaacactacgttggaggctcatcgttcctattcaggcagatgttatcgaggtccgacnnnnnnaaaacgtcatctactccccgaacttcccgatcggatacgcatgaggct

SEQ ID NO: 6682 - DNA, 146 bp, Artificial Sequence
  Bisulfite Padlock Probe
  misc_feature 92, 93, 94, 95, 96, 97: n = A,T,C or G
gactggaagagcactgtttccgaacctaaccaacaccccttcagttggaggctcatcgttcctattcaggcagatgttatcgaggtccgacnnnnnncattaaaaataaactcgcccgactccaaagatcggatacgcatgaggct

SEQ ID NO: 6683 - DNA, 146 bp, Artificial Sequence
  Bisulfite Padlock Probe
  misc_feature 92, 93, 94, 95, 96, 97: n = A,T,C or G
gactggaagagcactgtttccgaactatcaataaaatccacccgttggaggctcatcgttcctattcaggcagatgttatcgaggtccgacnnnnnncacccgactaaataaacgacccgcaaaaagatcggatacgcatgaggct

SEQ ID NO: 6684 - DNA, 146 bp, Artificial Sequence
  Bisulfite Padlock Probe
  misc_feature 92, 93, 94, 95, 96, 97: n = A,T,C or G
gactggaagagcactgtttccgaacttctcttttccctccaacgttggaggctcatcgttcctattcaggcagatgttatcgaggtccgacnnnnnnatacgacgataaaacctctccaaaaacaagatcggatacgcatgaggct

SEQ ID NO: 6685 - DNA, 146 bp, Artificial Sequence
  Bisulfite Padlock Probe
  misc_feature 92, 93, 94, 95, 96, 97: n = A,T,C or G
gactggaagagcactgtttccgaacttctcttttccctccgacgttggaggctcatcgttcctattcaggcagatgttatcgaggtccgacnnnnnnatacgacgataaaacctctccgaaaacaagatcggatacgcatgaggct

SEQ ID NO: 6686 - DNA, 146 bp, Artificial Sequence
  Bisulfite Padlock Probe
  misc_feature 94, 95, 96, 97, 98, 99: n = A,T,C or G
gactggaagagcactgtttccgaatcttactaccttccttaacccgttggaggctcatcgttcctattcaggcagatgttatcgaggtccgacnnnnnncccaaacgaaaaactctaccacacctcgatcggatacgcatgaggct

SEQ ID NO: 6687 - DNA, 146 bp, Artificial Sequence
  Bisulfite Padlock Probe
  misc_feature 92, 93, 94, 95, 96, 97: n = A,T,C or G
gactggaagagcactgtttccgaccactaaccgaaacaataacgttggaggctcatcgttcctattcaggcagatgttatcgaggtccgacnnnnnncaaatccaaaatcgcgacaaacaacaaacgatcggatacgcatgaggct

SEQ ID NO: 6688 - DNA, 146 bp, Artificial Sequence
  Bisulfite Padlock Probe
  misc_feature 92, 93, 94, 95, 96, 97: n = A,T,C or G
gactggaagagcactgtttccgaccactaaccgaaacgataacgttggaggctcatcgttcctattcaggcagatgttatcgaggtccgacnnnnnncaaatccaaaatcgcgacgaacaacaaacgatcggatacgcatgaggct

SEQ ID NO: 6689 - DNA, 146 bp, Artificial Sequence
  Bisulfite Padlock Probe
  misc_feature 93, 94, 95, 96, 97, 98: n = A,T,C or G
gactggaagagcactgtttccgaccctaaaacccccaaaacctagttggaggctcatcgttcctattcaggcagatgttatcgaggtccgacnnnnnncgcaccttttctttcaactacctaaaaagatcggatacgcatgaggct

SEQ ID NO: 6690 - DNA, 146 bp, Artificial Sequence
  Bisulfite Padlock Probe
  misc_feature 93, 94, 95, 96, 97, 98: n = A,T,C or G
gactggaagagcactgtttccgaccctaaaacccccgaaacctagttggaggctcatcgttcctattcaggcagatgttatcgaggtccgacnnnnnncgcgccttttctttcaactacctaaaaagatcggatacgcatgaggct

SEQ ID NO: 6691 - DNA, 146 bp, Artificial Sequence
  Bisulfite Padlock Probe
  misc_feature 92, 93, 94, 95, 96, 97: n = A,T,C or G
gactggaagagcactgtttccgactaataaaaactaaaccactgttggaggctcatcgttcctattcaggcagatgttatcgaggtccgacnnnnnncaataactcccctaactaaactataaactgatcggatacgcatgaggct

SEQ ID NO: 6692 - DNA, 146 bp, Artificial Sequence
  Bisulfite Padlock Probe
  misc_feature 92, 93, 94, 95, 96, 97: n = A,T,C or G
gactggaagagcactgtttccgactaataaaaactaaaccgctgttggaggctcatcgttcctattcaggcagatgttatcgaggtccgacnnnnnncaataactcccctaactaaactataaactgatcggatacgcatgaggct

SEQ ID NO: 6693 - DNA, 146 bp, Artificial Sequence
  Bisulfite Padlock Probe
  misc_feature 92, 93, 94, 95, 96, 97: n = A,T,C or G
gactggaagagcactgtttccgatcccgacgcaatacaaaatcgttggaggctcatcgttcctattcaggcagatgttatcgaggtccgacnnnnnnacctaatatcgatttccaacaaaaacaaagatcggatacgcatgaggct

SEQ ID NO: 6694 - DNA, 146 bp, Artificial Sequence
  Bisulfite Padlock Probe
  misc_feature 92, 93, 94, 95, 96, 97: n = A,T,C or G
gactggaagagcactgtttccgatcccgacgcgatacaaaatcgttggaggctcatcgttcctattcaggcagatgttatcgaggtccgacnnnnnnacctaatatcgatttccaacgaaaacaaagatcggatacgcatgaggct

SEQ ID NO: 6695 - DNA, 146 bp, Artificial Sequence
  Bisulfite Padlock Probe
  misc_feature 92, 93, 94, 95, 96, 97: n = A,T,C or G
gactggaagagcactgtttccgcaacctctacctacaataatagttggaggctcatcgttcctattcaggcagatgttatcgaggtccgacnnnnnnaccaacgactactccaaataaaacaaaaagatcggatacgcatgaggct

SEQ ID NO: 6696 - DNA, 146 bp, Artificial Sequence
  Bisulfite Padlock Probe
  misc_feature 92, 93, 94, 95, 96, 97: n = A,T,C or G
gactggaagagcactgtttccgcaacctctacctacgataatagttggaggctcatcgttcctattcaggcagatgttatcgaggtccgacnnnnnnaccaacgactactccgaataaaacaaaaagatcggatacgcatgaggct

SEQ ID NO: 6697 - DNA, 146 bp, Artificial Sequence
  Bisulfite Padlock Probe
  misc_feature 92, 93, 94, 95, 96, 97: n = A,T,C or G
gactggaagagcactgtttccgtaaaaatttctcccaataaaagttggaggctcatcgttcctattcaggcagatgttatcgaggtccgacnnnnnnacaacaccctaaactatcacaaacccctcgatcggatacgcatgaggct

SEQ ID NO: 6698 - DNA, 146 bp, Artificial Sequence
  Bisulfite Padlock Probe
  misc_feature 92, 93, 94, 95, 96, 97: n = A,T,C or G
gactggaagagcactgtttccgtaaaaatttctcccgataaaagttggaggctcatcgttcctattcaggcagatgttatcgaggtccgacnnnnnnacaacaccctaaactatcacaaacccctcgatcggatacgcatgaggct

SEQ ID NO: 6699 - DNA, 146 bp, Artificial Sequence
  Bisulfite Padlock Probe
  misc_feature 96, 97, 98, 99, 100, 101: n = A,T,C or G
gactggaagagcactgtttccgtacacccaaaattaataacaccaacgttggaggctcatcgttcctattcaggcagatgttatcgaggtccgacnnnnnnaaacacctaaaaacaaaaccaaaacgatcggatacgcatgaggct

SEQ ID NO: 6700 - DNA, 146 bp, Artificial Sequence
  Bisulfite Padlock Probe
  misc_feature 96, 97, 98, 99, 100, 101: n = A,T,C or G
gactggaagagcactgtttccgtacgcccaaaattaataacaccaacgttggaggctcatcgttcctattcaggcagatgttatcgaggtccgacnnnnnnaaacacctaaaaacgaaaccaaaacgatcggatacgcatgaggct

SEQ ID NO: 6701 - DNA, 146 bp, Artificial Sequence
  Bisulfite Padlock Probe
  misc_feature 94, 95, 96, 97, 98, 99: n = A,T,C or G
gactggaagagcactgtttccgtccgaactctcgaaaatatcaaagttggaggctcatcgttcctattcaggcagatgttatcgaggtccgacnnnnnnaactcctaccactcaccctaacaacccgatcggatacgcatgaggct

SEQ ID NO: 6702 - DNA, 146 bp, Artificial Sequence
  Bisulfite Padlock Probe
  misc_feature 94, 95, 96, 97, 98, 99: n = A,T,C or G
gactggaagagcactgtttccgtccgaactctcgaaaatatcgaagttggaggctcatcgttcctattcaggcagatgttatcgaggtccgacnnnnnnaactcctaccactcaccctaacgacccgatcggatacgcatgaggct

SEQ ID NO: 6703 - DNA, 146 bp, Artificial Sequence
  Bisulfite Padlock Probe
  misc_feature 92, 93, 94, 95, 96, 97: n = A,T,C or G
gactggaagagcactgtttcctaaaacaccaaaactaaactaagttggaggctcatcgttcctattcaggcagatgttatcgaggtccgacnnnnnnccaaaatctctaaccccaaatctcaaaaagatcggatacgcatgaggct

SEQ ID NO: 6704 - DNA, 146 bp, Artificial Sequence
  Bisulfite Padlock Probe
  misc_feature 96, 97, 98, 99, 100, 101: n = A,T,C or G
gactggaagagcactgtttcctaaaacgctctcaaaactccaactccgttggaggctcatcgttcctattcaggcagatgttatcgaggtccgacnnnnnnacctattttcttctacaaaaattacgatcggatacgcatgaggct

SEQ ID NO: 6705 - DNA, 146 bp, Artificial Sequence
  Bisulfite Padlock Probe
  misc_feature 96, 97, 98, 99, 100, 101: n = A,T,C or G
gactggaagagcactgtttcctaaaacgctctcgaaactccaactccgttggaggctcatcgttcctattcaggcagatgttatcgaggtccgacnnnnnnacctattttcttctacgaaaattacgatcggatacgcatgaggct

SEQ ID NO: 6706 - DNA, 146 bp, Artificial Sequence
  Bisulfite Padlock Probe
  misc_feature 92, 93, 94, 95, 96, 97: n = A,T,C or G
gactggaagagcactgtttcctaaaataaaaataacaataaaagttggaggctcatcgttcctattcaggcagatgttatcgaggtccgacnnnnnnaaaaccacacaaataaaacaaaatcctacgatcggatacgcatgaggct

SEQ ID NO: 6707 - DNA, 146 bp, Artificial Sequence
  Bisulfite Padlock Probe
  misc_feature 92, 93, 94, 95, 96, 97: n = A,T,C or G
gactggaagagcactgtttcctaaaataaaaataacaataaaagttggaggctcatcgttcctattcaggcagatgttatcgaggtccgacnnnnnnaaaaccgcacaaataaaacaaaatcctacgatcggatacgcatgaggct

SEQ ID NO: 6708 - DNA, 146 bp, Artificial Sequence
  Bisulfite Padlock Probe
  misc_feature 92, 93, 94, 95, 96, 97: n = A,T,C or G
gactggaagagcactgtttcctaaacaaacgaccaccctacccgttggaggctcatcgttcctattcaggcagatgttatcgaggtccgacnnnnnnaaaaacgaaccctccaaccacaaaaataagatcggatacgcatgaggct

SEQ ID NO: 6709 - DNA, 146 bp, Artificial Sequence
  Bisulfite Padlock Probe
  misc_feature 92, 93, 94, 95, 96, 97: n = A,T,C or G
gactggaagagcactgtttcctaaacaaacgaccgccctacccgttggaggctcatcgttcctattcaggcagatgttatcgaggtccgacnnnnnnaaaaacgaaccctccaaccgcaaaaataagatcggatacgcatgaggct

SEQ ID NO: 6710 - DNA, 146 bp, Artificial Sequence
  Bisulfite Padlock Probe
  misc_feature 95, 96, 97, 98, 99, 100: n = A,T,C or G
gactggaagagcactgtttcctaacccccattcctctaacccatcagttggaggctcatcgttcctattcaggcagatgttatcgaggtccgacnnnnnncataccgccacccccttctctaaaaagatcggatacgcatgaggct

SEQ ID NO: 6711 - DNA, 146 bp, Artificial Sequence
  Bisulfite Padlock Probe
  misc_feature 95, 96, 97, 98, 99, 100: n = A,T,C or G
gactggaagagcactgtttcctaacccccattcctctaacccatcagttggaggctcatcgttcctattcaggcagatgttatcgaggtccgacnnnnnncataccgccgcccccttctctaaaaagatcggatacgcatgaggct

SEQ ID NO: 6712 - DNA, 146 bp, Artificial Sequence
  Bisulfite Padlock Probe
  misc_feature 92, 93, 94, 95, 96, 97: n = A,T,C or G
gactggaagagcactgtttcctaataataacccacaaatataagttggaggctcatcgttcctattcaggcagatgttatcgaggtccgacnnnnnnaaataacctttttattaaaaaccaaactcgatcggatacgcatgaggct

SEQ ID NO: 6713 - DNA, 146 bp, Artificial Sequence
  Bisulfite Padlock Probe
  misc_feature 93, 94, 95, 96, 97, 98: n = A,T,C or G
gactggaagagcactgtttcctacaaaaccctacataacttatcgttggaggctcatcgttcctattcaggcagatgttatcgaggtccgacnnnnnnaaacgctaaaactaacatctcctaaaaagatcggatacgcatgaggct

SEQ ID NO: 6714 - DNA, 146 bp, Artificial Sequence
  Bisulfite Padlock Probe
  misc_feature 93, 94, 95, 96, 97, 98: n = A,T,C or G
gactggaagagcactgtttcctacaaaaccctacgtaacttatcgttggaggctcatcgttcctattcaggcagatgttatcgaggtccgacnnnnnnaaacgctaaaactaacgtctcctaaaaagatcggatacgcatgaggct

SEQ ID NO: 6715 - DNA, 146 bp, Artificial Sequence
  Bisulfite Padlock Probe
  misc_feature 92, 93, 94, 95, 96, 97: n = A,T,C or G
gactggaagagcactgtttcctacaccgacctaacactaaaaagttggaggctcatcgttcctattcaggcagatgttatcgaggtccgacnnnnnntcatcgtctatcttcttactccataaaacgatcggatacgcatgaggct

SEQ ID NO: 6716 - DNA, 146 bp, Artificial Sequence
  Bisulfite Padlock Probe
  misc_feature 92, 93, 94, 95, 96, 97: n = A,T,C or G
gactggaagagcactgtttcctacaccgacctaacgctaaaaagttggaggctcatcgttcctattcaggcagatgttatcgaggtccgacnnnnnntcatcgtctatcttcttactccgtaaaacgatcggatacgcatgaggct

SEQ ID NO: 6717 - DNA, 146 bp, Artificial Sequence
  Bisulfite Padlock Probe
  misc_feature 92, 93, 94, 95, 96, 97: n = A,T,C or G
gactggaagagcactgtttcctacatctatacccaccctaaccgttggaggctcatcgttcctattcaggcagatgttatcgaggtccgacnnnnnnaaacttcccataaaaccataaataaattcgatcggatacgcatgaggct

SEQ ID NO: 6718 - DNA, 146 bp, Artificial Sequence
  Bisulfite Padlock Probe
  misc_feature 96, 97, 98, 99, 100, 101: n = A,T,C or G
gactggaagagcactgtttcctacccacaaaactacctataccaaacgttggaggctcatcgttcctattcaggcagatgttatcgaggtccgacnnnnnnaaccgcccaaactaatacccaaaccgatcggatacgcatgaggct

SEQ ID NO: 6719 - DNA, 146 bp, Artificial Sequence
  Bisulfite Padlock Probe
  misc_feature 96, 97, 98, 99, 100, 101: n = A,T,C or G
gactggaagagcactgtttcctacccgcaaaactacctataccaaacgttggaggctcatcgttcctattcaggcagatgttatcgaggtccgacnnnnnnaaccgcccaaactaatacccgaaccgatcggatacgcatgaggct

SEQ ID NO: 6720 - DNA, 146 bp, Artificial Sequence
  Bisulfite Padlock Probe
  misc_feature 96, 97, 98, 99, 100, 101: n = A,T,C or G
gactggaagagcactgtttcctaccgaaaacaaaacccaaacataccgttggaggctcatcgttcctattcaggcagatgttatcgaggtccgacnnnnnnaaaaattccgaccccacccaacaacgatcggatacgcatgaggct

SEQ ID NO: 6721 - DNA, 146 bp, Artificial Sequence
  Bisulfite Padlock Probe
  misc_feature 96, 97, 98, 99, 100, 101: n = A,T,C or G
gactggaagagcactgtttcctaccgaaaacaaaacccgaacataccgttggaggctcatcgttcctattcaggcagatgttatcgaggtccgacnnnnnnaaaaattccgaccccgcccaacaacgatcggatacgcatgaggct

SEQ ID NO: 6722 - DNA, 146 bp, Artificial Sequence
  Bisulfite Padlock Probe
  misc_feature 92, 93, 94, 95, 96, 97: n = A,T,C or G
gactggaagagcactgtttcctacctactttatctctaacatcgttggaggctcatcgttcctattcaggcagatgttatcgaggtccgacnnnnnncaataacttcccaatattacctactaacagatcggatacgcatgaggct

SEQ ID NO: 6723 - DNA, 146 bp, Artificial Sequence
  Bisulfite Padlock Probe
  misc_feature 92, 93, 94, 95, 96, 97: n = A,T,C or G
gactggaagagcactgtttcctacctactttatctctaacatcgttggaggctcatcgttcctattcaggcagatgttatcgaggtccgacnnnnnncaataacttcccgatattacctactaacagatcggatacgcatgaggct

SEQ ID NO: 6724 - DNA, 146 bp, Artificial Sequence
  Bisulfite Padlock Probe
  misc_feature 92, 93, 94, 95, 96, 97: n = A,T,C or G
gactggaagagcactgtttcctacctctccaaacaaaacaaaagttggaggctcatcgttcctattcaggcagatgttatcgaggtccgacnnnnnnctaacaaatcattacaaactactaaataagatcggatacgcatgaggct

SEQ ID NO: 6725 - DNA, 146 bp, Artificial Sequence
  Bisulfite Padlock Probe
  misc_feature 92, 93, 94, 95, 96, 97: n = A,T,C or G
gactggaagagcactgtttcctacctctccaaacaaaacaaaagttggaggctcatcgttcctattcaggcagatgttatcgaggtccgacnnnnnnctaacaaatcattacgaactactaaataagatcggatacgcatgaggct

SEQ ID NO: 6726 - DNA, 146 bp, Artificial Sequence
  Bisulfite Padlock Probe
  misc_feature 93, 94, 95, 96, 97, 98: n = A,T,C or G
gactggaagagcactgtttcctacctttccttctcctccctcacgttggaggctcatcgttcctattcaggcagatgttatcgaggtccgacnnnnnnaactatccccgaactccgactcaaacaagatcggatacgcatgaggct

SEQ ID NO: 6727 - DNA, 146 bp, Artificial Sequence
  Bisulfite Padlock Probe
  misc_feature 93, 94, 95, 96, 97, 98: n = A,T,C or G
gactggaagagcactgtttcctacctttccttctcctccctcacgttggaggctcatcgttcctattcaggcagatgttatcgaggtccgacnnnnnnaactatccccgaactccgactcgaacaagatcggatacgcatgaggct

SEQ ID NO: 6728 - DNA, 146 bp, Artificial Sequence
  Bisulfite Padlock Probe
  misc_feature 92, 93, 94, 95, 96, 97: n = A,T,C or G
gactggaagagcactgtttcctactacgaaccttcccccaactgttggaggctcatcgttcctattcaggcagatgttatcgaggtccgacnnnnnntctaaaatacaacaacaccctccaaacccgatcggatacgcatgaggct

SEQ ID NO: 6729 - DNA, 146 bp, Artificial Sequence
  Bisulfite Padlock Probe
  misc_feature 92, 93, 94, 95, 96, 97: n = A,T,C or G
gactggaagagcactgtttcctactacgaaccttcccccgactgttggaggctcatcgttcctattcaggcagatgttatcgaggtccgacnnnnnntctaaaatacaacaacgccctccaaacccgatcggatacgcatgaggct

SEQ ID NO: 6730 - DNA, 146 bp, Artificial Sequence
  Bisulfite Padlock Probe
  misc_feature 92, 93, 94, 95, 96, 97: n = A,T,C or G
gactggaagagcactgtttcctatcaaaacccatcccaactccgttggaggctcatcgttcctattcaggcagatgttatcgaggtccgacnnnnnncccaactcaccaaaactaacgcactaaaagatcggatacgcatgaggct

SEQ ID NO: 6731 - DNA, 146 bp, Artificial Sequence
  Bisulfite Padlock Probe
  misc_feature 92, 93, 94, 95, 96, 97: n = A,T,C or G
gactggaagagcactgtttcctatcaaaacccatcccgactccgttggaggctcatcgttcctattcaggcagatgttatcgaggtccgacnnnnnncccaactcaccaaaactaacgcgctaaaagatcggatacgcatgaggct

SEQ ID NO: 6732 - DNA, 146 bp, Artificial Sequence
  Bisulfite Padlock Probe
  misc_feature 94, 95, 96, 97, 98, 99: n = A,T,C or G
gactggaagagcactgtttcctccaacccaaaaacaacatataacgttggaggctcatcgttcctattcaggcagatgttatcgaggtccgacnnnnnncaaaaatactattaaaaaccctaaaaagatcggatacgcatgaggct

SEQ ID NO: 6733 - DNA, 146 bp, Artificial Sequence
  Bisulfite Padlock Probe
  misc_feature 94, 95, 96, 97, 98, 99: n = A,T,C or G
gactggaagagcactgtttcctccaacccaaaaacgacatataacgttggaggctcatcgttcctattcaggcagatgttatcgaggtccgacnnnnnncgaaaatactattaaaaaccctaaaaagatcggatacgcatgaggct

SEQ ID NO: 6734 - DNA, 146 bp, Artificial Sequence
  Bisulfite Padlock Probe
  misc_feature 93, 94, 95, 96, 97, 98: n = A,T,C or G
gactggaagagcactgtttcctccaactcctctctataaatccagttggaggctcatcgttcctattcaggcagatgttatcgaggtccgacnnnnnnacaaaacgcaaaaactaatacccaaaaagatcggatacgcatgaggct

SEQ ID NO: 6735 - DNA, 146 bp, Artificial Sequence
  Bisulfite Padlock Probe
  misc_feature 92, 93, 94, 95, 96, 97: n = A,T,C or G
gactggaagagcactgtttcctccctccttaaattccccaaaagttggaggctcatcgttcctattcaggcagatgttatcgaggtccgacnnnnnntatctaaaccaacctaaataataaatcctgatcggatacgcatgaggct

SEQ ID NO: 6736 - DNA, 146 bp, Artificial Sequence
  Bisulfite Padlock Probe
  misc_feature 92, 93, 94, 95, 96, 97: n = A,T,C or G
gactggaagagcactgtttcctccgaacgtattcctccaactcgttggaggctcatcgttcctattcaggcagatgttatcgaggtccgacnnnnnnaaaaatctatataaaaacccaaaataccagatcggatacgcatgaggct

SEQ ID NO: 6737 - DNA, 146 bp, Artificial Sequence
  Bisulfite Padlock Probe
  misc_feature 92, 93, 94, 95, 96, 97: n = A,T,C or G
gactggaagagcactgtttcctccgaacgtattcctccgactcgttggaggctcatcgttcctattcaggcagatgttatcgaggtccgacnnnnnnaaaaatctatataaaaacccaaaataccagatcggatacgcatgaggct

SEQ ID NO: 6738 - DNA, 146 bp, Artificial Sequence
  Bisulfite Padlock Probe
  misc_feature 93, 94, 95, 96, 97, 98: n = A,T,C or G
gactggaagagcactgtttcctccgactcctctctataaatccagttggaggctcatcgttcctattcaggcagatgttatcgaggtccgacnnnnnnacaaaacgcaaaaactaatacccgaaaagatcggatacgcatgaggct

SEQ ID NO: 6739 - DNA, 146 bp, Artificial Sequence
  Bisulfite Padlock Probe
  misc_feature 95, 96, 97, 98, 99, 100: n = A,T,C or G
gactggaagagcactgtttcctcgacgataaaaacgaaacttacacgttggaggctcatcgttcctattcaggcagatgttatcgaggtccgacnnnnnnaaaaactaatccatcctacctaaaacgatcggatacgcatgaggct

SEQ ID NO: 6740 - DNA, 146 bp, Artificial Sequence
  Bisulfite Padlock Probe
  misc_feature 95, 96, 97, 98, 99, 100: n = A,T,C or G
gactggaagagcactgtttcctcgacgataaaaacgaaacttacgcgttggaggctcatcgttcctattcaggcagatgttatcgaggtccgacnnnnnnaaaaactaatccatcctacctaaaacgatcggatacgcatgaggct

SEQ ID NO: 6741 - DNA, 146 bp, Artificial Sequence
  Bisulfite Padlock Probe
  misc_feature 93, 94, 95, 96, 97, 98: n = A,T,C or G
gactggaagagcactgtttcctcgtcctccgtcaaacctaacaagttggaggctcatcgttcctattcaggcagatgttatcgaggtccgacnnnnnnaaaaaccaaacctatccccacctccctagatcggatacgcatgaggct

SEQ ID NO: 6742 - DNA, 146 bp, Artificial Sequence
  Bisulfite Padlock Probe
  misc_feature 93, 94, 95, 96, 97, 98: n = A,T,C or G
gactggaagagcactgtttcctcgtcctccgtcaaacctaacgagttggaggctcatcgttcctattcaggcagatgttatcgaggtccgacnnnnnnaaaaaccgaacctatccccacctccctagatcggatacgcatgaggct

SEQ ID NO: 6743 - DNA, 146 bp, Artificial Sequence
  Bisulfite Padlock Probe
  misc_feature 95, 96, 97, 98, 99, 100: n = A,T,C or G
gactggaagagcactgtttcctctactacccccactctaaaaacccgttggaggctcatcgttcctattcaggcagatgttatcgaggtccgacnnnnnnaaaaattcaaaaaactctccaaacccgatcggatacgcatgaggct

SEQ ID NO: 6744 - DNA, 146 bp, Artificial Sequence
  Bisulfite Padlock Probe
  misc_feature 95, 96, 97, 98, 99, 100: n = A,T,C or G
gactggaagagcactgtttcctctactacccccgctctaaaaacccgttggaggctcatcgttcctattcaggcagatgttatcgaggtccgacnnnnnnaaaaattcgaaaaactctccaaacccgatcggatacgcatgaggct

SEQ ID NO: 6745 - DNA, 146 bp, Artificial Sequence
  Bisulfite Padlock Probe
  misc_feature 93, 94, 95, 96, 97, 98: n = A,T,C or G
gactggaagagcactgtttcctctcctactaaacctttccaacagttggaggctcatcgttcctattcaggcagatgttatcgaggtccgacnnnnnnatacccaaaacccaaaactacttttaacgatcggatacgcatgaggct

SEQ ID NO: 6746 - DNA, 146 bp, Artificial Sequence
  Bisulfite Padlock Probe
  misc_feature 94, 95, 96, 97, 98, 99: n = A,T,C or G
gactggaagagcactgtttcctctccttcacccgaacatacaactgttggaggctcatcgttcctattcaggcagatgttatcgaggtccgacnnnnnnaaccctacaacaccacgatcaacaaccgatcggatacgcatgaggct

SEQ ID NO: 6747 - DNA, 146 bp, Artificial Sequence
  Bisulfite Padlock Probe
  misc_feature 94, 95, 96, 97, 98, 99: n = A,T,C or G
gactggaagagcactgtttcctctccttcacccgaacgtacaactgttggaggctcatcgttcctattcaggcagatgttatcgaggtccgacnnnnnnaaccctacaacaccacgatcaacgaccgatcggatacgcatgaggct

SEQ ID NO: 6748 - DNA, 146 bp, Artificial Sequence
  Bisulfite Padlock Probe
  misc_feature 92, 93, 94, 95, 96, 97: n = A,T,C or G
gactggaagagcactgtttccttaaaaataaataacctttaccgttggaggctcatcgttcctattcaggcagatgttatcgaggtccgacnnnnnntacctaaataccgacccaaaaaccaaaaagatcggatacgcatgaggct

SEQ ID NO: 6749 - DNA, 146 bp, Artificial Sequence
  Bisulfite Padlock Probe
  misc_feature 92, 93, 94, 95, 96, 97: n = A,T,C or G
gactggaagagcactgtttccttaaaaataaataacctttaccgttggaggctcatcgttcctattcaggcagatgttatcgaggtccgacnnnnnntacctaaataccgacccaaaaaccgaaaagatcggatacgcatgaggct

SEQ ID NO: 6750 - DNA, 146 bp, Artificial Sequence
  Bisulfite Padlock Probe
  misc_feature 94, 95, 96, 97, 98, 99: n = A,T,C or G
gactggaagagcactgtttccttatttatccaccaaacacaatttgttggaggctcatcgttcctattcaggcagatgttatcgaggtccgacnnnnnnacctccttccaaactaaaacctacctcgatcggatacgcatgaggct

SEQ ID NO: 6751 - DNA, 146 bp, Artificial Sequence
  Bisulfite Padlock Probe
  misc_feature 94, 95, 96, 97, 98, 99: n = A,T,C or G
gactggaagagcactgtttccttatttatccaccgaacacaatttgttggaggctcatcgttcctattcaggcagatgttatcgaggtccgacnnnnnnacctccttccaaactaaaacctacctcgatcggatacgcatgaggct

SEQ ID NO: 6752 - DNA, 146 bp, Artificial Sequence
  Bisulfite Padlock Probe
  misc_feature 92, 93, 94, 95, 96, 97: n = A,T,C or G
gactggaagagcactgtttccttcctcttattcctcccaactcgttggaggctcatcgttcctattcaggcagatgttatcgaggtccgacnnnnnnccaccctcaaacataaaaacaaataaaaagatcggatacgcatgaggct

SEQ ID NO: 6753 - DNA, 146 bp, Artificial Sequence
  Bisulfite Padlock Probe
  misc_feature 92, 93, 94, 95, 96, 97: n = A,T,C or G
gactggaagagcactgtttccttctactacaacttcctaaatcgttggaggctcatcgttcctattcaggcagatgttatcgaggtccgacnnnnnntacaactcaacaaaataataatcctccaagatcggatacgcatgaggct

SEQ ID NO: 6754 - DNA, 146 bp, Artificial Sequence
  Bisulfite Padlock Probe
  misc_feature 92, 93, 94, 95, 96, 97: n = A,T,C or G
gactggaagagcactgtttccttctactacaacttcctaaatcgttggaggctcatcgttcctattcaggcagatgttatcgaggtccgacnnnnnntacaactcgacaaaataataatcctccaagatcggatacgcatgaggct

SEQ ID NO: 6755 - DNA, 146 bp, Artificial Sequence
  Bisulfite Padlock Probe
  misc_feature 95, 96, 97, 98, 99, 100: n = A,T,C or G
gactggaagagcactgtttcctttacccccaaatcatatcatttaagttggaggctcatcgttcctattcaggcagatgttatcgaggtccgacnnnnnnacgtaaccttcccgaacatccaaaaagatcggatacgcatgaggct

SEQ ID NO: 6756 - DNA, 146 bp, Artificial Sequence
  Bisulfite Padlock Probe
  misc_feature 95, 96, 97, 98, 99, 100: n = A,T,C or G
gactggaagagcactgtttcctttacccccaaatcgtatcatttaagttggaggctcatcgttcctattcaggcagatgttatcgaggtccgacnnnnnnacgtaaccttcccgaacgtccaaaaagatcggatacgcatgaggct

SEQ ID NO: 6757 - DNA, 146 bp, Artificial Sequence
  Bisulfite Padlock Probe
  misc_feature 93, 94, 95, 96, 97, 98: n = A,T,C or G
gactggaagagcactgtttccttttaccaaaataacaaaaattagttggaggctcatcgttcctattcaggcagatgttatcgaggtccgacnnnnnnaaaaccactaaacctttcctaaataaccgatcggatacgcatgaggct

SEQ ID NO: 6758 - DNA, 146 bp, Artificial Sequence
  Bisulfite Padlock Probe
  misc_feature 92, 93, 94, 95, 96, 97: n = A,T,C or G
gactggaagagcactgtttccttttcttacaaataaaacaacagttggaggctcatcgttcctattcaggcagatgttatcgaggtccgacnnnnnnaactccatctaccacctacaaaaataaaagatcggatacgcatgaggct

SEQ ID NO: 6759 - DNA, 146 bp, Artificial Sequence
  Bisulfite Padlock Probe
  misc_feature 92, 93, 94, 95, 96, 97: n = A,T,C or G
gactggaagagcactgtttccttttcttacaaataaaacaacagttggaggctcatcgttcctattcaggcagatgttatcgaggtccgacnnnnnnaactccatctaccgcctacaaaaataaaagatcggatacgcatgaggct

SEQ ID NO: 6760 - DNA, 146 bp, Artificial Sequence
  Bisulfite Padlock Probe
  misc_feature 92, 93, 94, 95, 96, 97: n = A,T,C or G
gactggaagagcactgtttcgaaaaatttccaacctccaaaaagttggaggctcatcgttcctattcaggcagatgttatcgaggtccgacnnnnnntatccccaaaataaaccctcaaataaaccgatcggatacgcatgaggct

SEQ ID NO: 6761 - DNA, 146 bp, Artificial Sequence
  Bisulfite Padlock Probe
  misc_feature 92, 93, 94, 95, 96, 97: n = A,T,C or G
gactggaagagcactgtttcgaaaataccgacaaaccaacctagttggaggctcatcgttcctattcaggcagatgttatcgaggtccgacnnnnnnaaactccgactcccgtaaatacccaaaaagatcggatacgcatgaggct

SEQ ID NO: 6762 - DNA, 146 bp, Artificial Sequence
  Bisulfite Padlock Probe
  misc_feature 92, 93, 94, 95, 96, 97: n = A,T,C or G
gactggaagagcactgtttcgaaaataccgacgaaccaacctagttggaggctcatcgttcctattcaggcagatgttatcgaggtccgacnnnnnnaaactccgactcccgtaaatacccgaaaagatcggatacgcatgaggct

SEQ ID NO: 6763 - DNA, 146 bp, Artificial Sequence
  Bisulfite Padlock Probe
  misc_feature 94, 95, 96, 97, 98, 99: n = A,T,C or G
gactggaagagcactgtttcgaaattatctacgctcacaactaccgttggaggctcatcgttcctattcaggcagatgttatcgaggtccgacnnnnnnaaaaacactcgaaacgctcctacaaacgatcggatacgcatgaggct

SEQ ID NO: 6764 - DNA, 146 bp, Artificial Sequence
  Bisulfite Padlock Probe
  misc_feature 94, 95, 96, 97, 98, 99: n = A,T,C or G
gactggaagagcactgtttcgaaattatctacgctcgcaactaccgttggaggctcatcgttcctattcaggcagatgttatcgaggtccgacnnnnnnaaaaacactcgaaacgctcctacgaacgatcggatacgcatgaggct

SEQ ID NO: 6765 - DNA, 146 bp, Artificial Sequence
  Bisulfite Padlock Probe
  misc_feature 92, 93, 94, 95, 96, 97: n = A,T,C or G
gactggaagagcactgtttcgacaacaaaacaaaaatcaaaaagttggaggctcatcgttcctattcaggcagatgttatcgaggtccgacnnnnnnaccaaaccctactactcctactacaaaaagatcggatacgcatgaggct

SEQ ID NO: 6766 - DNA, 146 bp, Artificial Sequence
  Bisulfite Padlock Probe
  misc_feature 92, 93, 94, 95, 96, 97: n = A,T,C or G
gactggaagagcactgtttcgacaacgaaacaaaaatcaaaaagttggaggctcatcgttcctattcaggcagatgttatcgaggtccgacnnnnnnaccaaaccctactactcctactacaaaaagatcggatacgcatgaggct

SEQ ID NO: 6767 - DNA, 146 bp, Artificial Sequence
  Bisulfite Padlock Probe
  misc_feature 93, 94, 95, 96, 97, 98: n = A,T,C or G
gactggaagagcactgtttcgacgactccccactactacaaatagttggaggctcatcgttcctattcaggcagatgttatcgaggtccgacnnnnnnacctccctactccgcactatacaaaaaagatcggatacgcatgaggct

SEQ ID NO: 6768 - DNA, 146 bp, Artificial Sequence
  Bisulfite Padlock Probe
  misc_feature 93, 94, 95, 96, 97, 98: n = A,T,C or G
gactggaagagcactgtttcgacgactccccgctactacaaatagttggaggctcatcgttcctattcaggcagatgttatcgaggtccgacnnnnnnacctccctactccgcactatacgaaaaagatcggatacgcatgaggct

SEQ ID NO: 6769 - DNA, 146 bp, Artificial Sequence
  Bisulfite Padlock Probe
  misc_feature 92, 93, 94, 95, 96, 97: n = A,T,C or G
gactggaagagcactgtttcgatcactaatccaaaaataaaaagttggaggctcatcgttcctattcaggcagatgttatcgaggtccgacnnnnnnaatcccttcccaaaaacaacctctcctttgatcggatacgcatgaggct

SEQ ID NO: 6770 - DNA, 146 bp, Artificial Sequence
  Bisulfite Padlock Probe
  misc_feature 92, 93, 94, 95, 96, 97: n = A,T,C or G
gactggaagagcactgtttcgatcgctaatccaaaaataaaaagttggaggctcatcgttcctattcaggcagatgttatcgaggtccgacnnnnnnaatcccttcccaaaaacgacctctcctttgatcggatacgcatgaggct

SEQ ID NO: 6771 - DNA, 146 bp, Artificial Sequence
  Bisulfite Padlock Probe
  misc_feature 93, 94, 95, 96, 97, 98: n = A,T,C or G
gactggaagagcactgtttcgatctcccacttcaaactcgacacgttggaggctcatcgttcctattcaggcagatgttatcgaggtccgacnnnnnntccctcaacttatttatttactcaaattgatcggatacgcatgaggct

SEQ ID NO: 6772 - DNA, 146 bp, Artificial Sequence
  Bisulfite Padlock Probe
  misc_feature 93, 94, 95, 96, 97, 98: n = A,T,C or G
gactggaagagcactgtttcgatctcccacttcaaactcgacgcgttggaggctcatcgttcctattcaggcagatgttatcgaggtccgacnnnnnntccctcaacttatttatttactcaaattgatcggatacgcatgaggct

SEQ ID NO: 6773 - DNA, 146 bp, Artificial Sequence
  Bisulfite Padlock Probe
  misc_feature 95, 96, 97, 98, 99, 100: n = A,T,C or G
gactggaagagcactgtttcgccaataacaccaaaacaacaactacgttggaggctcatcgttcctattcaggcagatgttatcgaggtccgacnnnnnnacaaatacactttactattccaaaaagatcggatacgcatgaggct

SEQ ID NO: 6774 - DNA, 146 bp, Artificial Sequence
  Bisulfite Padlock Probe
  misc_feature 95, 96, 97, 98, 99, 100: n = A,T,C or G
gactggaagagcactgtttcgccaataacaccgaaacaacaactacgttggaggctcatcgttcctattcaggcagatgttatcgaggtccgacnnnnnnacgaatacactttactattccaaaaagatcggatacgcatgaggct

SEQ ID NO: 6775 - DNA, 146 bp, Artificial Sequence
  Bisulfite Padlock Probe
  misc_feature 92, 93, 94, 95, 96, 97: n = A,T,C or G
gactggaagagcactgtttcgctaactctccaacttccaaaccgttggaggctcatcgttcctattcaggcagatgttatcgaggtccgacnnnnnnaaaaatcatcaacataaacgccacaattagatcggatacgcatgaggct

SEQ ID NO: 6776 - DNA, 146 bp, Artificial Sequence
  Bisulfite Padlock Probe
  misc_feature 92, 93, 94, 95, 96, 97: n = A,T,C or G
gactggaagagcactgtttcgctaactctccaacttccgaaccgttggaggctcatcgttcctattcaggcagatgttatcgaggtccgacnnnnnnaaaaatcatcaacataaacgccgcaattagatcggatacgcatgaggct

SEQ ID NO: 6777 - DNA, 146 bp, Artificial Sequence
  Bisulfite Padlock Probe
  misc_feature 93, 94, 95, 96, 97, 98: n = A,T,C or G
gactggaagagcactgtttcgctcacctcccgacaattaaaaccgttggaggctcatcgttcctattcaggcagatgttatcgaggtccgacnnnnnnctaccgcctccaaactatcctaaaactcgatcggatacgcatgaggct

SEQ ID NO: 6778 - DNA, 146 bp, Artificial Sequence
  Bisulfite Padlock Probe
  misc_feature 93, 94, 95, 96, 97, 98: n = A,T,C or G
gactggaagagcactgtttcgctcacctcccgacgattaaaaccgttggaggctcatcgttcctattcaggcagatgttatcgaggtccgacnnnnnnctaccgcctccgaactatcctaaaactcgatcggatacgcatgaggct

SEQ ID NO: 6779 - DNA, 146 bp, Artificial Sequence
  Bisulfite Padlock Probe
  misc_feature 93, 94, 95, 96, 97, 98: n = A,T,C or G
gactggaagagcactgtttctaaaaacaaatcaatactaaaaatgttggaggctcatcgttcctattcaggcagatgttatcgaggtccgacnnnnnnaacctaaatccaaaacctaactttaaaagatcggatacgcatgaggct

SEQ ID NO: 6780 - DNA, 146 bp, Artificial Sequence
  Bisulfite Padlock Probe
  misc_feature 93, 94, 95, 96, 97, 98: n = A,T,C or G
gactggaagagcactgtttctaaaaacgaatcaatactaaaaatgttggaggctcatcgttcctattcaggcagatgttatcgaggtccgacnnnnnnaacctaaatccgaaacctaactttaaaagatcggatacgcatgaggct

SEQ ID NO: 6781 - DNA, 146 bp, Artificial Sequence
  Bisulfite Padlock Probe
  misc_feature 95, 96, 97, 98, 99, 100: n = A,T,C or G
gactggaagagcactgtttctaaaccaactaaaatccaaccaaaaagttggaggctcatcgttcctattcaggcagatgttatcgaggtccgacnnnnnnataaattaatcaccctaccaactaacgatcggatacgcatgaggct

SEQ ID NO: 6782 - DNA, 146 bp, Artificial Sequence
  Bisulfite Padlock Probe
  misc_feature 95, 96, 97, 98, 99, 100: n = A,T,C or G
gactggaagagcactgtttctaaaccaactaaaatccgaccaaaaagttggaggctcatcgttcctattcaggcagatgttatcgaggtccgacnnnnnnataaattaatcaccctaccgactaacgatcggatacgcatgaggct

SEQ ID NO: 6783 - DNA, 146 bp, Artificial Sequence
  Bisulfite Padlock Probe
  misc_feature 96, 97, 98, 99, 100, 101: n = A,T,C or G
gactggaagagcactgtttctaaatctcaacacccccaaccctaaaagttggaggctcatcgttcctattcaggcagatgttatcgaggtccgacnnnnnnaaaaatcaaaaccgaaacgcaccccgatcggatacgcatgaggct

SEQ ID NO: 6784 - DNA, 146 bp, Artificial Sequence
  Bisulfite Padlock Probe
  misc_feature 96, 97, 98, 99, 100, 101: n = A,T,C or G
gactggaagagcactgtttctaaatctcaacgcccccaaccctaaaagttggaggctcatcgttcctattcaggcagatgttatcgaggtccgacnnnnnnaaaaatcaaaaccgaaacgcgccccgatcggatacgcatgaggct

SEQ ID NO: 6785 - DNA, 146 bp, Artificial Sequence
  Bisulfite Padlock Probe
  misc_feature 95, 96, 97, 98, 99, 100: n = A,T,C or G
gactggaagagcactgtttctaaccaaccccatcctaaccctaaaagttggaggctcatcgttcctattcaggcagatgttatcgaggtccgacnnnnnntcctcttcactcccacaatccaaaccgatcggatacgcatgaggct

SEQ ID NO: 6786 - DNA, 146 bp, Artificial Sequence
  Bisulfite Padlock Probe
  misc_feature 95, 96, 97, 98, 99, 100: n = A,T,C or G
gactggaagagcactgtttctaaccaaccccgtcctaaccctaaaagttggaggctcatcgttcctattcaggcagatgttatcgaggtccgacnnnnnntcctcttcactcccacaatccaaaccgatcggatacgcatgaggct

SEQ ID NO: 6787 - DNA, 146 bp, Artificial Sequence
  Bisulfite Padlock Probe
  misc_feature 96, 97, 98, 99, 100, 101: n = A,T,C or G
gactggaagagcactgtttctaacttaaaactacgaatccccaccctgttggaggctcatcgttcctattcaggcagatgttatcgaggtccgacnnnnnnatctcgcaaacgcaaaactcaacccgatcggatacgcatgaggct

SEQ ID NO: 6788 - DNA, 146 bp, Artificial Sequence
  Bisulfite Padlock Probe
  misc_feature 96, 97, 98, 99, 100, 101: n = A,T,C or G
gactggaagagcactgtttctaacttaaaactacgaatccccgccctgttggaggctcatcgttcctattcaggcagatgttatcgaggtccgacnnnnnnatctcgcaaacgcgaaactcaacccgatcggatacgcatgaggct

SEQ ID NO: 6789 - DNA, 146 bp, Artificial Sequence
  Bisulfite Padlock Probe
  misc_feature 96, 97, 98, 99, 100, 101: n = A,T,C or G
gactggaagagcactgtttctaacttaatctatatttttatccctacgttggaggctcatcgttcctattcaggcagatgttatcgaggtccgacnnnnnncatctcccctatacacaaacaaaaagatcggatacgcatgaggct

SEQ ID NO: 6790 - DNA, 146 bp, Artificial Sequence
  Bisulfite Padlock Probe
  misc_feature 93, 94, 95, 96, 97, 98: n = A,T,C or G
gactggaagagcactgtttctaataaaatcaaaactaaaactaagttggaggctcatcgttcctattcaggcagatgttatcgaggtccgacnnnnnnactcccaaaccttacaaaaccataaccagatcggatacgcatgaggct

SEQ ID NO: 6791 - DNA, 146 bp, Artificial Sequence
  Bisulfite Padlock Probe
  misc_feature 93, 94, 95, 96, 97, 98: n = A,T,C or G
gactggaagagcactgtttctaataaaatcgaaactaaaactaagttggaggctcatcgttcctattcaggcagatgttatcgaggtccgacnnnnnnactcccaaaccttacaaaaccgtaaccagatcggatacgcatgaggct

SEQ ID NO: 6792 - DNA, 146 bp, Artificial Sequence
  Bisulfite Padlock Probe
  misc_feature 94, 95, 96, 97, 98, 99: n = A,T,C or G
gactggaagagcactgtttctaataaccaaaaacaaaaccaaaaagttggaggctcatcgttcctattcaggcagatgttatcgaggtccgacnnnnnncttcctcccaaaacaccaaaaccttcagatcggatacgcatgaggct

SEQ ID NO: 6793 - DNA, 146 bp, Artificial Sequence
  Bisulfite Padlock Probe
  misc_feature 94, 95, 96, 97, 98, 99: n = A,T,C or G
gactggaagagcactgtttctaataaccaaaaacgaaaccaaaaagttggaggctcatcgttcctattcaggcagatgttatcgaggtccgacnnnnnncttcctcccaaaacaccaaaaccttcagatcggatacgcatgaggct

SEQ ID NO: 6794 - DNA, 146 bp, Artificial Sequence
  Bisulfite Padlock Probe
  misc_feature 96, 97, 98, 99, 100, 101: n = A,T,C or G
gactggaagagcactgtttctaattaaaatctaaaccaactcttctagttggaggctcatcgttcctattcaggcagatgttatcgaggtccgacnnnnnncaaccccgataatcatatatactccgatcggatacgcatgaggct

SEQ ID NO: 6795 - DNA, 146 bp, Artificial Sequence
  Bisulfite Padlock Probe
  misc_feature 96, 97, 98, 99, 100, 101: n = A,T,C or G
gactggaagagcactgtttctaattaaaatctaaaccaactcttctagttggaggctcatcgttcctattcaggcagatgttatcgaggtccgacnnnnnncaaccccgataatcgtatatactccgatcggatacgcatgaggct

SEQ ID NO: 6796 - DNA, 146 bp, Artificial Sequence
  Bisulfite Padlock Probe
  misc_feature 96, 97, 98, 99, 100, 101: n = A,T,C or G
gactggaagagcactgtttctaattccaaaaccgccaaaccaaataagttggaggctcatcgttcctattcaggcagatgttatcgaggtccgacnnnnnntctcgcctactcactaaacataaccgatcggatacgcatgaggct

SEQ ID NO: 6797 - DNA, 146 bp, Artificial Sequence
  Bisulfite Padlock Probe
  misc_feature 96, 97, 98, 99, 100, 101: n = A,T,C or G
gactggaagagcactgtttctaattccaaaaccgccgaaccaaataagttggaggctcatcgttcctattcaggcagatgttatcgaggtccgacnnnnnntctcgcctactcgctaaacataaccgatcggatacgcatgaggct

SEQ ID NO: 6798 - DNA, 146 bp, Artificial Sequence
  Bisulfite Padlock Probe
  misc_feature 95, 96, 97, 98, 99, 100: n = A,T,C or G
gactggaagagcactgtttctacaaacgatcgcaacactaactccagttggaggctcatcgttcctattcaggcagatgttatcgaggtccgacnnnnnncccacctaaacctaaaaactctaaccgatcggatacgcatgaggct

SEQ ID NO: 6799 - DNA, 146 bp, Artificial Sequence
  Bisulfite Padlock Probe
  misc_feature 95, 96, 97, 98, 99, 100: n = A,T,C or G
gactggaagagcactgtttctacaaacgatcgcaacgctaactccagttggaggctcatcgttcctattcaggcagatgttatcgaggtccgacnnnnnncccacctaaacctaaaaactctaaccgatcggatacgcatgaggct

SEQ ID NO: 6800 - DNA, 146 bp, Artificial Sequence
  Bisulfite Padlock Probe
  misc_feature 93, 94, 95, 96, 97, 98: n = A,T,C or G
gactggaagagcactgtttctacaactaaaacctacttaaaaacgttggaggctcatcgttcctattcaggcagatgttatcgaggtccgacnnnnnnaaaaactctctctacaaaacaaaaactagatcggatacgcatgaggct

SEQ ID NO: 6801 - DNA, 146 bp, Artificial Sequence
  Bisulfite Padlock Probe
  misc_feature 93, 94, 95, 96, 97, 98: n = A,T,C or G
gactggaagagcactgtttctacaactaaaacctacttaaaaacgttggaggctcatcgttcctattcaggcagatgttatcgaggtccgacnnnnnnaaaaactctctctacgaaacaaaaactagatcggatacgcatgaggct

SEQ ID NO: 6802 - DNA, 146 bp, Artificial Sequence
  Bisulfite Padlock Probe
  misc_feature 92, 93, 94, 95, 96, 97: n = A,T,C or G
gactggaagagcactgtttctacacaaaaaccccaacccacccgttggaggctcatcgttcctattcaggcagatgttatcgaggtccgacnnnnnnaaaacccccaaacccaacttctaaactctgatcggatacgcatgaggct

SEQ ID NO: 6803 - DNA, 146 bp, Artificial Sequence
  Bisulfite Padlock Probe
  misc_feature 92, 93, 94, 95, 96, 97: n = A,T,C or G
gactggaagagcactgtttctacacccgcgtaacaaactatacgttggaggctcatcgttcctattcaggcagatgttatcgaggtccgacnnnnnnaaaaataaacgaacattataaaacaaaaagatcggatacgcatgaggct

SEQ ID NO: 6804 - DNA, 146 bp, Artificial Sequence
  Bisulfite Padlock Probe
  misc_feature 92, 93, 94, 95, 96, 97: n = A,T,C or G
gactggaagagcactgtttctacacccgcgtaacgaactatacgttggaggctcatcgttcctattcaggcagatgttatcgaggtccgacnnnnnnaaaaataaacgaacattataaaacgaaaagatcggatacgcatgaggct

SEQ ID NO: 6805 - DNA, 146 bp, Artificial Sequence
  Bisulfite Padlock Probe
  misc_feature 92, 93, 94, 95, 96, 97: n = A,T,C or G
gactggaagagcactgtttctacaccgccgcctaaatcacatagttggaggctcatcgttcctattcaggcagatgttatcgaggtccgacnnnnnnaaacgcgataaaaaccgacaaaactaaacgatcggatacgcatgaggct

SEQ ID NO: 6806 - DNA, 146 bp, Artificial Sequence
  Bisulfite Padlock Probe
  misc_feature 92, 93, 94, 95, 96, 97: n = A,T,C or G
gactggaagagcactgtttctacaccgccgcctaaatcacgtagttggaggctcatcgttcctattcaggcagatgttatcgaggtccgacnnnnnnaaacgcgataaaaaccgacgaaactaaacgatcggatacgcatgaggct

SEQ ID NO: 6807 - DNA, 146 bp, Artificial Sequence
  Bisulfite Padlock Probe
  misc_feature 92, 93, 94, 95, 96, 97: n = A,T,C or G
gactggaagagcactgtttctacacgaaaaccccaacccacccgttggaggctcatcgttcctattcaggcagatgttatcgaggtccgacnnnnnnaaaacccccaaacccaacttctaaactctgatcggatacgcatgaggct

SEQ ID NO: 6808 - DNA, 146 bp, Artificial Sequence
  Bisulfite Padlock Probe
  misc_feature 96, 97, 98, 99, 100, 101: n = A,T,C or G
gactggaagagcactgtttctaccactacaaccctcctactattaccgttggaggctcatcgttcctattcaggcagatgttatcgaggtccgacnnnnnncaaataaaaatctaattccaaaaccgatcggatacgcatgaggct

SEQ ID NO: 6809 - DNA, 146 bp, Artificial Sequence
  Bisulfite Padlock Probe
  misc_feature 92, 93, 94, 95, 96, 97: n = A,T,C or G
gactggaagagcactgtttctaccactaccacatctacaaaacgttggaggctcatcgttcctattcaggcagatgttatcgaggtccgacnnnnnnctaaacttctccttaccctaaaaactactgatcggatacgcatgaggct

SEQ ID NO: 6810 - DNA, 146 bp, Artificial Sequence
  Bisulfite Padlock Probe
  misc_feature 92, 93, 94, 95, 96, 97: n = A,T,C or G
gactggaagagcactgtttctaccctaaacccaaaaactcctcgttggaggctcatcgttcctattcaggcagatgttatcgaggtccgacnnnnnnctcaaaacaaaatctcccaaaatcaaaccgatcggatacgcatgaggct

SEQ ID NO: 6811 - DNA, 146 bp, Artificial Sequence
  Bisulfite Padlock Probe
  misc_feature 92, 93, 94, 95, 96, 97: n = A,T,C or G
gactggaagagcactgtttctaccctaaacccgaaaactcctcgttggaggctcatcgttcctattcaggcagatgttatcgaggtccgacnnnnnnctcaaaacaaaatctcccgaaatcaaaccgatcggatacgcatgaggct

SEQ ID NO: 6812 - DNA, 146 bp, Artificial Sequence
  Bisulfite Padlock Probe
  misc_feature 92, 93, 94, 95, 96, 97: n = A,T,C or G
gactggaagagcactgtttctaccgataacctctctcccacccgttggaggctcatcgttcctattcaggcagatgttatcgaggtccgacnnnnnnacaaaacataattttctcaaaaaataaaagatcggatacgcatgaggct

SEQ ID NO: 6813 - DNA, 146 bp, Artificial Sequence
  Bisulfite Padlock Probe
  misc_feature 92, 93, 94, 95, 96, 97: n = A,T,C or G
gactggaagagcactgtttctaccgataacctctctcccgcccgttggaggctcatcgttcctattcaggcagatgttatcgaggtccgacnnnnnnacaaaacataattttctcgaaaaataaaagatcggatacgcatgaggct

SEQ ID NO: 6814 - DNA, 146 bp, Artificial Sequence
  Bisulfite Padlock Probe
  misc_feature 93, 94, 95, 96, 97, 98: n = A,T,C or G
gactggaagagcactgtttctacctaaaaattataaataaaaccgttggaggctcatcgttcctattcaggcagatgttatcgaggtccgacnnnnnnacaaaaacccgaaaaacgaaaacaaaaagatcggatacgcatgaggct

SEQ ID NO: 6815 - DNA, 146 bp, Artificial Sequence
  Bisulfite Padlock Probe
  misc_feature 93, 94, 95, 96, 97, 98: n = A,T,C or G
gactggaagagcactgtttctacctaaaaattataaataaaaccgttggaggctcatcgttcctattcaggcagatgttatcgaggtccgacnnnnnnacaaaaacccgaaaaacgaaaacgaaaagatcggatacgcatgaggct

SEQ ID NO: 6816 - DNA, 146 bp, Artificial Sequence
  Bisulfite Padlock Probe
  misc_feature 93, 94, 95, 96, 97, 98: n = A,T,C or G
gactggaagagcactgtttctacctccaaacaaaactaaacaaagttggaggctcatcgttcctattcaggcagatgttatcgaggtccgacnnnnnnacatacaaaaccctaaatactaaccaacgatcggatacgcatgaggct

SEQ ID NO: 6817 - DNA, 146 bp, Artificial Sequence
  Bisulfite Padlock Probe
  misc_feature 94, 95, 96, 97, 98, 99: n = A,T,C or G
gactggaagagcactgtttctacctccctatctccttctaattctgttggaggctcatcgttcctattcaggcagatgttatcgaggtccgacnnnnnnaaaaacgctacgcaaaatatacaaaaagatcggatacgcatgaggct

SEQ ID NO: 6818 - DNA, 146 bp, Artificial Sequence
  Bisulfite Padlock Probe
  misc_feature 94, 95, 96, 97, 98, 99: n = A,T,C or G
gactggaagagcactgtttctacctccctatctccttctaattctgttggaggctcatcgttcctattcaggcagatgttatcgaggtccgacnnnnnnaaaaacgctacgcgaaatatacaaaaagatcggatacgcatgaggct

SEQ ID NO: 6819 - DNA, 146 bp, Artificial Sequence
  Bisulfite Padlock Probe
  misc_feature 93, 94, 95, 96, 97, 98: n = A,T,C or G
gactggaagagcactgtttctacctccgaacaaaactaaacaaagttggaggctcatcgttcctattcaggcagatgttatcgaggtccgacnnnnnnacatacaaaaccctaaatactaaccgacgatcggatacgcatgaggct

SEQ ID NO: 6820 - DNA, 146 bp, Artificial Sequence
  Bisulfite Padlock Probe
  misc_feature 92, 93, 94, 95, 96, 97: n = A,T,C or G
gactggaagagcactgtttctacctcttcctacaacaactaacgttggaggctcatcgttcctattcaggcagatgttatcgaggtccgacnnnnnnccaacctctacaaataataaacaaatccagatcggatacgcatgaggct

SEQ ID NO: 6821 - DNA, 146 bp, Artificial Sequence
  Bisulfite Padlock Probe
  misc_feature 92, 93, 94, 95, 96, 97: n = A,T,C or G
gactggaagagcactgtttctacctcttcctacgacaactaacgttggaggctcatcgttcctattcaggcagatgttatcgaggtccgacnnnnnnccaacctctacaaataataaacaaatccagatcggatacgcatgaggct

SEQ ID NO: 6822 - DNA, 146 bp, Artificial Sequence
  Bisulfite Padlock Probe
  misc_feature 93, 94, 95, 96, 97, 98: n = A,T,C or G
gactggaagagcactgtttctacgaaaccttcctttcaacacacgttggaggctcatcgttcctattcaggcagatgttatcgaggtccgacnnnnnnaaactcataccccttcctttcccctctcgatcggatacgcatgaggct

SEQ ID NO: 6823 - DNA, 146 bp, Artificial Sequence
  Bisulfite Padlock Probe
  misc_feature 93, 94, 95, 96, 97, 98: n = A,T,C or G
gactggaagagcactgtttctacgaaaccttcctttcaacgcacgttggaggctcatcgttcctattcaggcagatgttatcgaggtccgacnnnnnnaaactcataccccttcctttcccctctcgatcggatacgcatgaggct

SEQ ID NO: 6824 - DNA, 146 bp, Artificial Sequence
  Bisulfite Padlock Probe
  misc_feature 95, 96, 97, 98, 99, 100: n = A,T,C or G
gactggaagagcactgtttctacgacctcaacgcaatccctaaaacgttggaggctcatcgttcctattcaggcagatgttatcgaggtccgacnnnnnncacaacatcaaacccaaaaaccaaaagatcggatacgcatgaggct

SEQ ID NO: 6825 - DNA, 146 bp, Artificial Sequence
  Bisulfite Padlock Probe
  misc_feature 95, 96, 97, 98, 99, 100: n = A,T,C or G
gactggaagagcactgtttctacgacctcaacgcgatccctaaaacgttggaggctcatcgttcctattcaggcagatgttatcgaggtccgacnnnnnncacaacgtcaaacccaaaaaccaaaagatcggatacgcatgaggct

SEQ ID NO: 6826 - DNA, 146 bp, Artificial Sequence
  Bisulfite Padlock Probe
  misc_feature 96, 97, 98, 99, 100, 101: n = A,T,C or G
gactggaagagcactgtttctactaaaacataaaatacttcaatacagttggaggctcatcgttcctattcaggcagatgttatcgaggtccgacnnnnnnaaaaactctacccaataactaaaaagatcggatacgcatgaggct

SEQ ID NO: 6827 - DNA, 146 bp, Artificial Sequence
  Bisulfite Padlock Probe
  misc_feature 95, 96, 97, 98, 99, 100: n = A,T,C or G
gactggaagagcactgtttctactataaccgcccccattctaaatagttggaggctcatcgttcctattcaggcagatgttatcgaggtccgacnnnnnntccaaccctctaaccaaaaccacctcgatcggatacgcatgaggct

SEQ ID NO: 6828 - DNA, 146 bp, Artificial Sequence
  Bisulfite Padlock Probe
  misc_feature 95, 96, 97, 98, 99, 100: n = A,T,C or G
gactggaagagcactgtttctactataaccgcccccgttctaaatagttggaggctcatcgttcctattcaggcagatgttatcgaggtccgacnnnnnntccaaccctctaaccaaaaccgcctcgatcggatacgcatgaggct

SEQ ID NO: 6829 - DNA, 146 bp, Artificial Sequence
  Bisulfite Padlock Probe
  misc_feature 93, 94, 95, 96, 97, 98: n = A,T,C or G
gactggaagagcactgtttctactataccctacacccttaccccgttggaggctcatcgttcctattcaggcagatgttatcgaggtccgacnnnnnnaactacttaaaacacctacctccaaaaagatcggatacgcatgaggct

SEQ ID NO: 6830 - DNA, 146 bp, Artificial Sequence
  Bisulfite Padlock Probe
  misc_feature 93, 94, 95, 96, 97, 98: n = A,T,C or G
gactggaagagcactgtttctactataccctacgcccttaccccgttggaggctcatcgttcctattcaggcagatgttatcgaggtccgacnnnnnnaactacttaaaacacctacctccaaaaagatcggatacgcatgaggct

SEQ ID NO: 6831 - DNA, 146 bp, Artificial Sequence
  Bisulfite Padlock Probe
  misc_feature 94, 95, 96, 97, 98, 99: n = A,T,C or G
gactggaagagcactgtttctactcaaaaatcccctccctaaaacgttggaggctcatcgttcctattcaggcagatgttatcgaggtccgacnnnnnntaaataccccctcctcctaaatttaccgatcggatacgcatgaggct

SEQ ID NO: 6832 - DNA, 146 bp, Artificial Sequence
  Bisulfite Padlock Probe
  misc_feature 93, 94, 95, 96, 97, 98: n = A,T,C or G
gactggaagagcactgtttctactcatctccaaacttcaaacccgttggaggctcatcgttcctattcaggcagatgttatcgaggtccgacnnnnnncttccttatctaactcttaaaaacaacagatcggatacgcatgaggct

SEQ ID NO: 6833 - DNA, 146 bp, Artificial Sequence
  Bisulfite Padlock Probe
  misc_feature 93, 94, 95, 96, 97, 98: n = A,T,C or G
gactggaagagcactgtttctactcatctccgaacttcaaacccgttggaggctcatcgttcctattcaggcagatgttatcgaggtccgacnnnnnncttccttatctaactcttaaaaacaacagatcggatacgcatgaggct

SEQ ID NO: 6834 - DNA, 146 bp, Artificial Sequence
  Bisulfite Padlock Probe
  misc_feature 92, 93, 94, 95, 96, 97: n = A,T,C or G
gactggaagagcactgtttctactccaaaaatctctccaaaaagttggaggctcatcgttcctattcaggcagatgttatcgaggtccgacnnnnnntctactccaaaaaatatctaaaacttctagatcggatacgcatgaggct

SEQ ID NO: 6835 - DNA, 146 bp, Artificial Sequence
  Bisulfite Padlock Probe
  misc_feature 92, 93, 94, 95, 96, 97: n = A,T,C or G
gactggaagagcactgtttctactccaaaaatctctccaaaaagttggaggctcatcgttcctattcaggcagatgttatcgaggtccgacnnnnnntctactccgaaaaatatctaaaacttctagatcggatacgcatgaggct

SEQ ID NO: 6836 - DNA, 146 bp, Artificial Sequence
  Bisulfite Padlock Probe
  misc_feature 94, 95, 96, 97, 98, 99: n = A,T,C or G
gactggaagagcactgtttctactcgaaaatcccctccctaaaacgttggaggctcatcgttcctattcaggcagatgttatcgaggtccgacnnnnnntaaataccccctcctcctaaatttaccgatcggatacgcatgaggct

SEQ ID NO: 6837 - DNA, 146 bp, Artificial Sequence
  Bisulfite Padlock Probe
  misc_feature 95, 96, 97, 98, 99, 100: n = A,T,C or G
gactggaagagcactgtttctactcgctaacaacactcataaacaagttggaggctcatcgttcctattcaggcagatgttatcgaggtccgacnnnnnnaaactcccgacccatcctaaaaccaagatcggatacgcatgaggct

SEQ ID NO: 6838 - DNA, 146 bp, Artificial Sequence
  Bisulfite Padlock Probe
  misc_feature 95, 96, 97, 98, 99, 100: n = A,T,C or G
gactggaagagcactgtttctactcgctaacgacactcataaacaagttggaggctcatcgttcctattcaggcagatgttatcgaggtccgacnnnnnnaaactcccgacccgtcctaaaaccaagatcggatacgcatgaggct

SEQ ID NO: 6839 - DNA, 146 bp, Artificial Sequence
  Bisulfite Padlock Probe
  misc_feature 93, 94, 95, 96, 97, 98: n = A,T,C or G
gactggaagagcactgtttctataaataccccttactcctctaagttggaggctcatcgttcctattcaggcagatgttatcgaggtccgacnnnnnntaataataaaaacctaaaaacttaactcgatcggatacgcatgaggct

SEQ ID NO: 6840 - DNA, 146 bp, Artificial Sequence
  Bisulfite Padlock Probe
  misc_feature 95, 96, 97, 98, 99, 100: n = A,T,C or G
gactggaagagcactgtttctatacaacaaaaacaactccatctaagttggaggctcatcgttcctattcaggcagatgttatcgaggtccgacnnnnnnaacatatacgacaaaataacactatcgatcggatacgcatgaggct

SEQ ID NO: 6841 - DNA, 146 bp, Artificial Sequence
  Bisulfite Padlock Probe
  misc_feature 95, 96, 97, 98, 99, 100: n = A,T,C or G
gactggaagagcactgtttctatacaacgaaaacaactccatctaagttggaggctcatcgttcctattcaggcagatgttatcgaggtccgacnnnnnnaacatatacgacaaaataacgctatcgatcggatacgcatgaggct

SEQ ID NO: 6842 - DNA, 146 bp, Artificial Sequence
  Bisulfite Padlock Probe
  misc_feature 92, 93, 94, 95, 96, 97: n = A,T,C or G
gactggaagagcactgtttctatcctacaaataacctaacctagttggaggctcatcgttcctattcaggcagatgttatcgaggtccgacnnnnnnaaccgccgaaaaacccttaatcataaaaagatcggatacgcatgaggct

SEQ ID NO: 6843 - DNA, 146 bp, Artificial Sequence
  Bisulfite Padlock Probe
  misc_feature 92, 93, 94, 95, 96, 97: n = A,T,C or G
gactggaagagcactgtttctatcctacaaataacctaacctagttggaggctcatcgttcctattcaggcagatgttatcgaggtccgacnnnnnnaaccgccgaaaaacccttaatcgtaaaaagatcggatacgcatgaggct

SEQ ID NO: 6844 - DNA, 146 bp, Artificial Sequence
  Bisulfite Padlock Probe
  misc_feature 95, 96, 97, 98, 99, 100: n = A,T,C or G
gactggaagagcactgtttctattaatataccaaaaaccaccaaccgttggaggctcatcgttcctattcaggcagatgttatcgaggtccgacnnnnnnatataattacccactataaccacaccgatcggatacgcatgaggct

SEQ ID NO: 6845 - DNA, 146 bp, Artificial Sequence
  Bisulfite Padlock Probe
  misc_feature 95, 96, 97, 98, 99, 100: n = A,T,C or G
gactggaagagcactgtttctattaatataccaaaaaccaccgaccgttggaggctcatcgttcctattcaggcagatgttatcgaggtccgacnnnnnnatataattacccactataaccacgccgatcggatacgcatgaggct

SEQ ID NO: 6846 - DNA, 146 bp, Artificial Sequence
  Bisulfite Padlock Probe
  misc_feature 95, 96, 97, 98, 99, 100: n = A,T,C or G
gactggaagagcactgtttctattataacaaacaactactaaataagttggaggctcatcgttcctattcaggcagatgttatcgaggtccgacnnnnnnaaaaataacccaaattaaaaacaaacgatcggatacgcatgaggct

SEQ ID NO: 6847 - DNA, 146 bp, Artificial Sequence
  Bisulfite Padlock Probe
  misc_feature 95, 96, 97, 98, 99, 100: n = A,T,C or G
gactggaagagcactgtttctattatactaatctcttattcaatcagttggaggctcatcgttcctattcaggcagatgttatcgaggtccgacnnnnnnatatctccttaaaacctccctaaaaagatcggatacgcatgaggct

SEQ ID NO: 6848 - DNA, 146 bp, Artificial Sequence
  Bisulfite Padlock Probe
  misc_feature 92, 93, 94, 95, 96, 97: n = A,T,C or G
gactggaagagcactgtttctattctatacctactttataaacgttggaggctcatcgttcctattcaggcagatgttatcgaggtccgacnnnnnnaataaccgaacaaaaattaactcactaacgatcggatacgcatgaggct

SEQ ID NO: 6849 - DNA, 146 bp, Artificial Sequence
  Bisulfite Padlock Probe
  misc_feature 92, 93, 94, 95, 96, 97: n = A,T,C or G
gactggaagagcactgtttctattctatacctactttataaacgttggaggctcatcgttcctattcaggcagatgttatcgaggtccgacnnnnnnaataaccgaacgaaaattaactcactaacgatcggatacgcatgaggct

SEQ ID NO: 6850 - DNA, 146 bp, Artificial Sequence
  Bisulfite Padlock Probe
  misc_feature 94, 95, 96, 97, 98, 99: n = A,T,C or G
gactggaagagcactgtttctcaaaaacaaaacaacttaatacccgttggaggctcatcgttcctattcaggcagatgttatcgaggtccgacnnnnnnaactataaaacaaacacacactctccagatcggatacgcatgaggct

SEQ ID NO: 6851 - DNA, 146 bp, Artificial Sequence
  Bisulfite Padlock Probe
  misc_feature 95, 96, 97, 98, 99, 100: n = A,T,C or G
gactggaagagcactgtttctcaaataatcaaccaacatcccaaaagttggaggctcatcgttcctattcaggcagatgttatcgaggtccgacnnnnnnccatccaaaatccgcgaccacaaaaagatcggatacgcatgaggct

SEQ ID NO: 6852 - DNA, 146 bp, Artificial Sequence
  Bisulfite Padlock Probe
  misc_feature 95, 96, 97, 98, 99, 100: n = A,T,C or G
gactggaagagcactgtttctcaaataatcaaccaacgtcccaaaagttggaggctcatcgttcctattcaggcagatgttatcgaggtccgacnnnnnnccatccaaaatccgcgaccgcaaaaagatcggatacgcatgaggct

SEQ ID NO: 6853 - DNA, 146 bp, Artificial Sequence
  Bisulfite Padlock Probe
  misc_feature 93, 94, 95, 96, 97, 98: n = A,T,C or G
gactggaagagcactgtttctcaaccaaaaataaaataatatttgttggaggctcatcgttcctattcaggcagatgttatcgaggtccgacnnnnnnttccacccaaaacttacacctaaaccccgatcggatacgcatgaggct

SEQ ID NO: 6854 - DNA, 146 bp, Artificial Sequence
  Bisulfite Padlock Probe
  misc_feature 93, 94, 95, 96, 97, 98: n = A,T,C or G
gactggaagagcactgtttctcaaccgaaaataaaataatatttgttggaggctcatcgttcctattcaggcagatgttatcgaggtccgacnnnnnnttccacccgaaacttacacctaaaccccgatcggatacgcatgaggct

SEQ ID NO: 6855 - DNA, 146 bp, Artificial Sequence
  Bisulfite Padlock Probe
  misc_feature 93, 94, 95, 96, 97, 98: n = A,T,C or G
gactggaagagcactgtttctcaactaattatcaaaatatcatagttggaggctcatcgttcctattcaggcagatgttatcgaggtccgacnnnnnnaactacacacaacaactataataacttcgatcggatacgcatgaggct

SEQ ID NO: 6856 - DNA, 146 bp, Artificial Sequence
  Bisulfite Padlock Probe
  misc_feature 93, 94, 95, 96, 97, 98: n = A,T,C or G
gactggaagagcactgtttctcaactaattatcaaaatatcatagttggaggctcatcgttcctattcaggcagatgttatcgaggtccgacnnnnnnaactacacacaacgactataataacttcgatcggatacgcatgaggct

SEQ ID NO: 6857 - DNA, 146 bp, Artificial Sequence
  Bisulfite Padlock Probe
  misc_feature 92, 93, 94, 95, 96, 97: n = A,T,C or G
gactggaagagcactgtttctcacaataaaccccaactacaccgttggaggctcatcgttcctattcaggcagatgttatcgaggtccgacnnnnnncaaacctaaaatatataaatatatttaaagatcggatacgcatgaggct

SEQ ID NO: 6858 - DNA, 146 bp, Artificial Sequence
  Bisulfite Padlock Probe
  misc_feature 95, 96, 97, 98, 99, 100: n = A,T,C or G
gactggaagagcactgtttctcaccttaaactatcacaacaaccccgttggaggctcatcgttcctattcaggcagatgttatcgaggtccgacnnnnnnaaaatactaaaaatcaaaaactaaacgatcggatacgcatgaggct

SEQ ID NO: 6859 - DNA, 146 bp, Artificial Sequence
  Bisulfite Padlock Probe
  misc_feature 92, 93, 94, 95, 96, 97: n = A,T,C or G
gactggaagagcactgtttctcacgtcaccacttcctaattccgttggaggctcatcgttcctattcaggcagatgttatcgaggtccgacnnnnnnccttcctccctctaaaactaaaaacaaccgatcggatacgcatgaggct

SEQ ID NO: 6860 - DNA, 146 bp, Artificial Sequence
  Bisulfite Padlock Probe
  misc_feature 92, 93, 94, 95, 96, 97: n = A,T,C or G
gactggaagagcactgtttctcacgtcaccgcttcctaattccgttggaggctcatcgttcctattcaggcagatgttatcgaggtccgacnnnnnnccttcctccctctaaaactaaaaacaaccgatcggatacgcatgaggct

SEQ ID NO: 6861 - DNA, 146 bp, Artificial Sequence
  Bisulfite Padlock Probe
  misc_feature 96, 97, 98, 99, 100, 101: n = A,T,C or G
gactggaagagcactgtttctccaaaaacaataaatttcaaccaaaagttggaggctcatcgttcctattcaggcagatgttatcgaggtccgacnnnnnntcaacctaccataacccgcaaaaaagatcggatacgcatgaggct

SEQ ID NO: 6862 - DNA, 146 bp, Artificial Sequence
  Bisulfite Padlock Probe
  misc_feature 96, 97, 98, 99, 100, 101: n = A,T,C or G
gactggaagagcactgtttctccaaaaacaataaatttcaaccaaaagttggaggctcatcgttcctattcaggcagatgttatcgaggtccgacnnnnnntcaacctaccataacccgcgaaaaagatcggatacgcatgaggct

SEQ ID NO: 6863 - DNA, 146 bp, Artificial Sequence
  Bisulfite Padlock Probe
  misc_feature 92, 93, 94, 95, 96, 97: n = A,T,C or G
gactggaagagcactgtttctccaaaaccacaaccacctcaacgttggaggctcatcgttcctattcaggcagatgttatcgaggtccgacnnnnnnacaaaactacctcaaaataacaaaaaaccgatcggatacgcatgaggct

SEQ ID NO: 6864 - DNA, 146 bp, Artificial Sequence
  Bisulfite Padlock Probe
  misc_feature 92, 93, 94, 95, 96, 97: n = A,T,C or G
gactggaagagcactgtttctccaaaaccacgaccacctcaacgttggaggctcatcgttcctattcaggcagatgttatcgaggtccgacnnnnnnacaaaactacctcaaaataacgaaaaaccgatcggatacgcatgaggct

SEQ ID NO: 6865 - DNA, 146 bp, Artificial Sequence
  Bisulfite Padlock Probe
  misc_feature 92, 93, 94, 95, 96, 97: n = A,T,C or G
gactggaagagcactgtttctccaaacctcaatctcccctcccgttggaggctcatcgttcctattcaggcagatgttatcgaggtccgacnnnnnncaataaaaccgacccaaaaacaataactagatcggatacgcatgaggct

SEQ ID NO: 6866 - DNA, 146 bp, Artificial Sequence
  Bisulfite Padlock Probe
  misc_feature 92, 93, 94, 95, 96, 97: n = A,T,C or G
gactggaagagcactgtttctccaaacctcgatctcccctcccgttggaggctcatcgttcctattcaggcagatgttatcgaggtccgacnnnnnncaataaaaccgacccgaaaacaataactagatcggatacgcatgaggct

SEQ ID NO: 6867 - DNA, 146 bp, Artificial Sequence
  Bisulfite Padlock Probe
  misc_feature 92, 93, 94, 95, 96, 97: n = A,T,C or G
gactggaagagcactgtttctcccatcccaaaactactaaactgttggaggctcatcgttcctattcaggcagatgttatcgaggtccgacnnnnnnaaaacaaaacccgaaaatcccaaacacctgatcggatacgcatgaggct

SEQ ID NO: 6868 - DNA, 146 bp, Artificial Sequence
  Bisulfite Padlock Probe
  misc_feature 92, 93, 94, 95, 96, 97: n = A,T,C or G
gactggaagagcactgtttctcccatcccaaaactactaaactgttggaggctcatcgttcctattcaggcagatgttatcgaggtccgacnnnnnnaaaacaaaacccgaaaatcccgaacacctgatcggatacgcatgaggct

SEQ ID NO: 6869 - DNA, 146 bp, Artificial Sequence
  Bisulfite Padlock Probe
  misc_feature 92, 93, 94, 95, 96, 97: n = A,T,C or G
gactggaagagcactgtttctccccaaaaccccaatatccctcgttggaggctcatcgttcctattcaggcagatgttatcgaggtccgacnnnnnnaacctaaatatacactaaaaataaaccccgatcggatacgcatgaggct

SEQ ID NO: 6870 - DNA, 146 bp, Artificial Sequence
  Bisulfite Padlock Probe
  misc_feature 92, 93, 94, 95, 96, 97: n = A,T,C or G
gactggaagagcactgtttctccccaaaaccccgatatccctcgttggaggctcatcgttcctattcaggcagatgttatcgaggtccgacnnnnnnaacctaaatatacgctaaaaataaaccccgatcggatacgcatgaggct

SEQ ID NO: 6871 - DNA, 146 bp, Artificial Sequence
  Bisulfite Padlock Probe
  misc_feature 92, 93, 94, 95, 96, 97: n = A,T,C or G
gactggaagagcactgtttctcccccatattccattcctcttcgttggaggctcatcgttcctattcaggcagatgttatcgaggtccgacnnnnnncctataaacaaaccaacaaaatcaataacgatcggatacgcatgaggct

SEQ ID NO: 6872 - DNA, 146 bp, Artificial Sequence
  Bisulfite Padlock Probe
  misc_feature 92, 93, 94, 95, 96, 97: n = A,T,C or G
gactggaagagcactgtttctcccccgtattccattcctcttcgttggaggctcatcgttcctattcaggcagatgttatcgaggtccgacnnnnnncctataaacaaaccaacaaaatcaataacgatcggatacgcatgaggct

SEQ ID NO: 6873 - DNA, 146 bp, Artificial Sequence
  Bisulfite Padlock Probe
  misc_feature 92, 93, 94, 95, 96, 97: n = A,T,C or G
gactggaagagcactgtttctcccctcccgacaactcaaaaaagttggaggctcatcgttcctattcaggcagatgttatcgaggtccgacnnnnnnactaatacgcaaactaaaactaaaactacgatcggatacgcatgaggct

SEQ ID NO: 6874 - DNA, 146 bp, Artificial Sequence
  Bisulfite Padlock Probe
  misc_feature 92, 93, 94, 95, 96, 97: n = A,T,C or G
gactggaagagcactgtttctcccctcccgacaactcgaaaaagttggaggctcatcgttcctattcaggcagatgttatcgaggtccgacnnnnnnactaatacgcgaactaaaactaaaactacgatcggatacgcatgaggct

SEQ ID NO: 6875 - DNA, 146 bp, Artificial Sequence
  Bisulfite Padlock Probe
  misc_feature 96, 97, 98, 99, 100, 101: n = A,T,C or G
gactggaagagcactgtttctccctccccaacactccaaaaactaaagttggaggctcatcgttcctattcaggcagatgttatcgaggtccgacnnnnnnaaaattaacatctctataaaatcccgatcggatacgcatgaggct

SEQ ID NO: 6876 - DNA, 146 bp, Artificial Sequence
  Bisulfite Padlock Probe
  misc_feature 95, 96, 97, 98, 99, 100: n = A,T,C or G
gactggaagagcactgtttctccctctcccctttactaaaacctaagttggaggctcatcgttcctattcaggcagatgttatcgaggtccgacnnnnnnctactcctctacccaatcccccacccgatcggatacgcatgaggct

SEQ ID NO: 6877 - DNA, 146 bp, Artificial Sequence
  Bisulfite Padlock Probe
  misc_feature 93, 94, 95, 96, 97, 98: n = A,T,C or G
gactggaagagcactgtttctccgtaaaaataaaaccataaaacgttggaggctcatcgttcctattcaggcagatgttatcgaggtccgacnnnnnnatacttaaacaaccgcaactcccaatacgatcggatacgcatgaggct

SEQ ID NO: 6878 - DNA, 146 bp, Artificial Sequence
  Bisulfite Padlock Probe
  misc_feature 93, 94, 95, 96, 97, 98: n = A,T,C or G
gactggaagagcactgtttctccgtaaaaataaaaccgtaaaacgttggaggctcatcgttcctattcaggcagatgttatcgaggtccgacnnnnnnatacttaaacaaccgcaactcccgatacgatcggatacgcatgaggct

SEQ ID NO: 6879 - DNA, 146 bp, Artificial Sequence
  Bisulfite Padlock Probe
  misc_feature 96, 97, 98, 99, 100, 101: n = A,T,C or G
gactggaagagcactgtttctcctaacaataaccctaacactaaaaagttggaggctcatcgttcctattcaggcagatgttatcgaggtccgacnnnnnnacgacgactcacactaaacatactcgatcggatacgcatgaggct

SEQ ID NO: 6880 - DNA, 146 bp, Artificial Sequence
  Bisulfite Padlock Probe
  misc_feature 96, 97, 98, 99, 100, 101: n = A,T,C or G
gactggaagagcactgtttctcctaacaataaccctaacgctaaaaagttggaggctcatcgttcctattcaggcagatgttatcgaggtccgacnnnnnnacgacgactcgcactaaacatactcgatcggatacgcatgaggct

SEQ ID NO: 6881 - DNA, 146 bp, Artificial Sequence
  Bisulfite Padlock Probe
  misc_feature 94, 95, 96, 97, 98, 99: n = A,T,C or G
gactggaagagcactgtttctcctacctatctcctccaataaaaagttggaggctcatcgttcctattcaggcagatgttatcgaggtccgacnnnnnnaaaaatactccttccaccaaccaaatcgatcggatacgcatgaggct

SEQ ID NO: 6882 - DNA, 146 bp, Artificial Sequence
  Bisulfite Padlock Probe
  misc_feature 94, 95, 96, 97, 98, 99: n = A,T,C or G
gactggaagagcactgtttctcctacctatctcctccaataaaaagttggaggctcatcgttcctattcaggcagatgttatcgaggtccgacnnnnnnaaaaatactccttccgccaaccaaatcgatcggatacgcatgaggct

SEQ ID NO: 6883 - DNA, 146 bp, Artificial Sequence
  Bisulfite Padlock Probe
  misc_feature 93, 94, 95, 96, 97, 98: n = A,T,C or G
gactggaagagcactgtttctcctatctcccatatttttacaacgttggaggctcatcgttcctattcaggcagatgttatcgaggtccgacnnnnnnaaaacgaacgaaactaaaaacaaaatacgatcggatacgcatgaggct

SEQ ID NO: 6884 - DNA, 146 bp, Artificial Sequence
  Bisulfite Padlock Probe
  misc_feature 93, 94, 95, 96, 97, 98: n = A,T,C or G
gactggaagagcactgtttctcctatctcccgtatttttacaacgttggaggctcatcgttcctattcaggcagatgttatcgaggtccgacnnnnnnaaaacgaacgaaactaaaaacgaaatacgatcggatacgcatgaggct

SEQ ID NO: 6885 - DNA, 146 bp, Artificial Sequence
  Bisulfite Padlock Probe
  misc_feature 94, 95, 96, 97, 98, 99: n = A,T,C or G
gactggaagagcactgtttctcgaaaacaaaacaacttaatacccgttggaggctcatcgttcctattcaggcagatgttatcgaggtccgacnnnnnnaactataaaacgaacacacactctccagatcggatacgcatgaggct

SEQ ID NO: 6886 - DNA, 146 bp, Artificial Sequence
  Bisulfite Padlock Probe
  misc_feature 92, 93, 94, 95, 96, 97: n = A,T,C or G
gactggaagagcactgtttctcgcaataaaccccaactacaccgttggaggctcatcgttcctattcaggcagatgttatcgaggtccgacnnnnnncaaacctaaaatatataaatatatttaaagatcggatacgcatgaggct

SEQ ID NO: 6887 - DNA, 146 bp, Artificial Sequence
  Bisulfite Padlock Probe
  misc_feature 95, 96, 97, 98, 99, 100: n = A,T,C or G
gactggaagagcactgtttctcgccttaaactatcacaacaaccccgttggaggctcatcgttcctattcaggcagatgttatcgaggtccgacnnnnnnaaaatactaaaaatcgaaaactaaacgatcggatacgcatgaggct

SEQ ID NO: 6888 - DNA, 146 bp, Artificial Sequence
  Bisulfite Padlock Probe
  misc_feature 92, 93, 94, 95, 96, 97: n = A,T,C or G
gactggaagagcactgtttctcgtaccactcctaaaaatttccgttggaggctcatcgttcctattcaggcagatgttatcgaggtccgacnnnnnnacactaaactaactccttatataaaacatgatcggatacgcatgaggct

SEQ ID NO: 6889 - DNA, 146 bp, Artificial Sequence
  Bisulfite Padlock Probe
  misc_feature 92, 93, 94, 95, 96, 97: n = A,T,C or G
gactggaagagcactgtttctcgtaccgctcctaaaaatttccgttggaggctcatcgttcctattcaggcagatgttatcgaggtccgacnnnnnnacactaaactaactccttatataaaacatgatcggatacgcatgaggct

SEQ ID NO: 6890 - DNA, 146 bp, Artificial Sequence
  Bisulfite Padlock Probe
  misc_feature 96, 97, 98, 99, 100, 101: n = A,T,C or G
gactggaagagcactgtttctctaaactactcctccaacttccctaagttggaggctcatcgttcctattcaggcagatgttatcgaggtccgacnnnnnnaaacgaccaaccgcaaaaataaaaagatcggatacgcatgaggct

SEQ ID NO: 6891 - DNA, 146 bp, Artificial Sequence
  Bisulfite Padlock Probe
  misc_feature 96, 97, 98, 99, 100, 101: n = A,T,C or G
gactggaagagcactgtttctctaaactactcctccaacttccctaagttggaggctcatcgttcctattcaggcagatgttatcgaggtccgacnnnnnnaaacgaccaaccgcgaaaataaaaagatcggatacgcatgaggct

SEQ ID NO: 6892 - DNA, 146 bp, Artificial Sequence
  Bisulfite Padlock Probe
  misc_feature 93, 94, 95, 96, 97, 98: n = A,T,C or G
gactggaagagcactgtttctctaatatcaacctcacacccctcgttggaggctcatcgttcctattcaggcagatgttatcgaggtccgacnnnnnnaaaaacaaaccttaaaacccaaaccaacgatcggatacgcatgaggct

SEQ ID NO: 6893 - DNA, 146 bp, Artificial Sequence
  Bisulfite Padlock Probe
  misc_feature 93, 94, 95, 96, 97, 98: n = A,T,C or G
gactggaagagcactgtttctctaatatcaacctcacacccctcgttggaggctcatcgttcctattcaggcagatgttatcgaggtccgacnnnnnnaaaaacgaaccttaaaacccaaaccaacgatcggatacgcatgaggct

SEQ ID NO: 6894 - DNA, 146 bp, Artificial Sequence
  Bisulfite Padlock Probe
  misc_feature 92, 93, 94, 95, 96, 97: n = A,T,C or G
gactggaagagcactgtttctctaatttcaaaccactttactcgttggaggctcatcgttcctattcaggcagatgttatcgaggtccgacnnnnnncatatacctccaataacacttaacaaatcgatcggatacgcatgaggct

SEQ ID NO: 6895 - DNA, 146 bp, Artificial Sequence
  Bisulfite Padlock Probe
  misc_feature 94, 95, 96, 97, 98, 99: n = A,T,C or G
gactggaagagcactgtttctctactaaaaatacaaaaattaaacgttggaggctcatcgttcctattcaggcagatgttatcgaggtccgacnnnnnntccacaacaaaaacttcctcccacacagatcggatacgcatgaggct

SEQ ID NO: 6896 - DNA, 146 bp, Artificial Sequence
  Bisulfite Padlock Probe
  misc_feature 93, 94, 95, 96, 97, 98: n = A,T,C or G
gactggaagagcactgtttctctactcccaccaaactactaaaagttggaggctcatcgttcctattcaggcagatgttatcgaggtccgacnnnnnnacaaaaaccacccctcccctaaaaacctgatcggatacgcatgaggct

SEQ ID NO: 6897 - DNA, 146 bp, Artificial Sequence
  Bisulfite Padlock Probe
  misc_feature 94, 95, 96, 97, 98, 99: n = A,T,C or G
gactggaagagcactgtttctctccaactacaaaatatataactcgttggaggctcatcgttcctattcaggcagatgttatcgaggtccgacnnnnnnaaaaacaaaacaaaactaaaataaaaagatcggatacgcatgaggct

SEQ ID NO: 6898 - DNA, 146 bp, Artificial Sequence
  Bisulfite Padlock Probe
  misc_feature 94, 95, 96, 97, 98, 99: n = A,T,C or G
gactggaagagcactgtttctcttccaaatttactctcccaacccgttggaggctcatcgttcctattcaggcagatgttatcgaggtccgacnnnnnnctaacctaaacaacgacccaaactcccgatcggatacgcatgaggct

SEQ ID NO: 6899 - DNA, 146 bp, Artificial Sequence
  Bisulfite Padlock Probe
  misc_feature 94, 95, 96, 97, 98, 99: n = A,T,C or G
gactggaagagcactgtttctcttccaaatttactctcccgacccgttggaggctcatcgttcctattcaggcagatgttatcgaggtccgacnnnnnnctaacctaaacaacgacccgaactcccgatcggatacgcatgaggct

SEQ ID NO: 6900 - DNA, 146 bp, Artificial Sequence
  Bisulfite Padlock Probe
  misc_feature 96, 97, 98, 99, 100, 101: n = A,T,C or G
gactggaagagcactgtttcttaaacaacgactacaacaaatactccgttggaggctcatcgttcctattcaggcagatgttatcgaggtccgacnnnnnnctactactacgcatactataaaaacgatcggatacgcatgaggct

SEQ ID NO: 6901 - DNA, 146 bp, Artificial Sequence
  Bisulfite Padlock Probe
  misc_feature 96, 97, 98, 99, 100, 101: n = A,T,C or G
gactggaagagcactgtttcttaaacaacgactacaacgaatactccgttggaggctcatcgttcctattcaggcagatgttatcgaggtccgacnnnnnnctactactacgcgtactataaaaacgatcggatacgcatgaggct

SEQ ID NO: 6902 - DNA, 146 bp, Artificial Sequence
  Bisulfite Padlock Probe
  misc_feature 92, 93, 94, 95, 96, 97: n = A,T,C or G
gactggaagagcactgtttcttaaactccaaccccacacatccgttggaggctcatcgttcctattcaggcagatgttatcgaggtccgacnnnnnnctactactactataatccaaaaccaaaacgatcggatacgcatgaggct

SEQ ID NO: 6903 - DNA, 146 bp, Artificial Sequence
  Bisulfite Padlock Probe
  misc_feature 92, 93, 94, 95, 96, 97: n = A,T,C or G
gactggaagagcactgtttcttaaactccaaccccgcacatccgttggaggctcatcgttcctattcaggcagatgttatcgaggtccgacnnnnnnctactactactataatccaaaaccaaaacgatcggatacgcatgaggct

SEQ ID NO: 6904 - DNA, 146 bp, Artificial Sequence
  Bisulfite Padlock Probe
  misc_feature 93, 94, 95, 96, 97, 98: n = A,T,C or G
gactggaagagcactgtttcttacccgccttctctccatcaatcgttggaggctcatcgttcctattcaggcagatgttatcgaggtccgacnnnnnncgctaatcccgacacgaacgtcataaaagatcggatacgcatgaggct

SEQ ID NO: 6905 - DNA, 146 bp, Artificial Sequence
  Bisulfite Padlock Probe
  misc_feature 93, 94, 95, 96, 97, 98: n = A,T,C or G
gactggaagagcactgtttcttacccgccttctctccatcgatcgttggaggctcatcgttcctattcaggcagatgttatcgaggtccgacnnnnnncgctaatcccgacacgaacgtcgtaaaagatcggatacgcatgaggct

SEQ ID NO: 6906 - DNA, 146 bp, Artificial Sequence
  Bisulfite Padlock Probe
  misc_feature 93, 94, 95, 96, 97, 98: n = A,T,C or G
gactggaagagcactgtttcttcacacccttctccctaaacttcgttggaggctcatcgttcctattcaggcagatgttatcgaggtccgacnnnnnntcaataactacctaaacatctactacccgatcggatacgcatgaggct

SEQ ID NO: 6907 - DNA, 146 bp, Artificial Sequence
  Bisulfite Padlock Probe
  misc_feature 93, 94, 95, 96, 97, 98: n = A,T,C or G
gactggaagagcactgtttcttcacgcccttctccctaaacttcgttggaggctcatcgttcctattcaggcagatgttatcgaggtccgacnnnnnntcaataactacctaaacatctactacccgatcggatacgcatgaggct

SEQ ID NO: 6908 - DNA, 146 bp, Artificial Sequence
  Bisulfite Padlock Probe
  misc_feature 92, 93, 94, 95, 96, 97: n = A,T,C or G
gactggaagagcactgtttcttcactaatccttcttcaaaaaagttggaggctcatcgttcctattcaggcagatgttatcgaggtccgacnnnnnnaaaaataaaacaccacttaaatcctataagatcggatacgcatgaggct

SEQ ID NO: 6909 - DNA, 146 bp, Artificial Sequence
  Bisulfite Padlock Probe
  misc_feature 92, 93, 94, 95, 96, 97: n = A,T,C or G
gactggaagagcactgtttcttcactaatccttcttcgaaaaagttggaggctcatcgttcctattcaggcagatgttatcgaggtccgacnnnnnnaaaaataaaacaccacttaaatcctataagatcggatacgcatgaggct

SEQ ID NO: 6910 - DNA, 146 bp, Artificial Sequence
  Bisulfite Padlock Probe
  misc_feature 93, 94, 95, 96, 97, 98: n = A,T,C or G
gactggaagagcactgtttcttccaaccactacaaatccaaaaagttggaggctcatcgttcctattcaggcagatgttatcgaggtccgacnnnnnnaaaacacgaaaccccaaatctaaactccgatcggatacgcatgaggct

SEQ ID NO: 6911 - DNA, 146 bp, Artificial Sequence
  Bisulfite Padlock Probe
  misc_feature 92, 93, 94, 95, 96, 97: n = A,T,C or G
gactggaagagcactgtttcttccatcctcccctaaacaaaacgttggaggctcatcgttcctattcaggcagatgttatcgaggtccgacnnnnnnttctcgcaatacaacctatacctaaaaatgatcggatacgcatgaggct

SEQ ID NO: 6912 - DNA, 146 bp, Artificial Sequence
  Bisulfite Padlock Probe
  misc_feature 92, 93, 94, 95, 96, 97: n = A,T,C or G
gactggaagagcactgtttcttccatcctcccctaaacgaaacgttggaggctcatcgttcctattcaggcagatgttatcgaggtccgacnnnnnnttctcgcgatacaacctatacctaaaaatgatcggatacgcatgaggct

SEQ ID NO: 6913 - DNA, 146 bp, Artificial Sequence
  Bisulfite Padlock Probe
  misc_feature 93, 94, 95, 96, 97, 98: n = A,T,C or G
gactggaagagcactgtttcttccgaccactacaaatccaaaaagttggaggctcatcgttcctattcaggcagatgttatcgaggtccgacnnnnnnaaaacacgaaaccccgaatctaaactccgatcggatacgcatgaggct

SEQ ID NO: 6914 - DNA, 146 bp, Artificial Sequence
  Bisulfite Padlock Probe
  misc_feature 94, 95, 96, 97, 98, 99: n = A,T,C or G
gactggaagagcactgtttcttcctacaacaatttacaaacaaatgttggaggctcatcgttcctattcaggcagatgttatcgaggtccgacnnnnnntattataatcacaaaaatatttaatatgatcggatacgcatgaggct

SEQ ID NO: 6915 - DNA, 146 bp, Artificial Sequence
  Bisulfite Padlock Probe
  misc_feature 94, 95, 96, 97, 98, 99: n = A,T,C or G
gactggaagagcactgtttcttcctacaacaatttacaaacgaatgttggaggctcatcgttcctattcaggcagatgttatcgaggtccgacnnnnnntattataatcgcaaaaatatttaatatgatcggatacgcatgaggct

SEQ ID NO: 6916 - DNA, 146 bp, Artificial Sequence
  Bisulfite Padlock Probe
  misc_feature 95, 96, 97, 98, 99, 100: n = A,T,C or G
gactggaagagcactgtttcttcctataattcgtcaaccccctcccgttggaggctcatcgttcctattcaggcagatgttatcgaggtccgacnnnnnncaaaacccactatacccaaaacaaccgatcggatacgcatgaggct

SEQ ID NO: 6917 - DNA, 146 bp, Artificial Sequence
  Bisulfite Padlock Probe
  misc_feature 95, 96, 97, 98, 99, 100: n = A,T,C or G
gactggaagagcactgtttcttcctataattcgtcgaccccctcccgttggaggctcatcgttcctattcaggcagatgttatcgaggtccgacnnnnnncaaaacccactatacccgaaacaaccgatcggatacgcatgaggct

SEQ ID NO: 6918 - DNA, 146 bp, Artificial Sequence
  Bisulfite Padlock Probe
  misc_feature 96, 97, 98, 99, 100, 101: n = A,T,C or G
gactggaagagcactgtttcttccttcccaaatctaaaaataataaagttggaggctcatcgttcctattcaggcagatgttatcgaggtccgacnnnnnngaaccccgccctacacaacaaaatcgatcggatacgcatgaggct

SEQ ID NO: 6919 - DNA, 146 bp, Artificial Sequence
  Bisulfite Padlock Probe
  misc_feature 96, 97, 98, 99, 100, 101: n = A,T,C or G
gactggaagagcactgtttcttccttcccaaatctaaaaataataaagttggaggctcatcgttcctattcaggcagatgttatcgaggtccgacnnnnnngaaccccgccctacgcaacaaaatcgatcggatacgcatgaggct

SEQ ID NO: 6920 - DNA, 146 bp, Artificial Sequence
  Bisulfite Padlock Probe
  misc_feature 93, 94, 95, 96, 97, 98: n = A,T,C or G
gactggaagagcactgtttcttccttctctcccacctcctctccgttggaggctcatcgttcctattcaggcagatgttatcgaggtccgacnnnnnnacaacgacttaaactcgaccataaccacgatcggatacgcatgaggct

SEQ ID NO: 6921 - DNA, 146 bp, Artificial Sequence
  Bisulfite Padlock Probe
  misc_feature 93, 94, 95, 96, 97, 98: n = A,T,C or G
gactggaagagcactgtttcttccttctctcccacctcctctccgttggaggctcatcgttcctattcaggcagatgttatcgaggtccgacnnnnnnacaacgacttaaactcgaccataaccgcgatcggatacgcatgaggct

SEQ ID NO: 6922 - DNA, 146 bp, Artificial Sequence
  Bisulfite Padlock Probe
  misc_feature 93, 94, 95, 96, 97, 98: n = A,T,C or G
gactggaagagcactgtttcttctccctaccataccccaaactcgttggaggctcatcgttcctattcaggcagatgttatcgaggtccgacnnnnnnactccacatccactaactaattcaaaaagatcggatacgcatgaggct

SEQ ID NO: 6923 - DNA, 146 bp, Artificial Sequence
  Bisulfite Padlock Probe
  misc_feature 93, 94, 95, 96, 97, 98: n = A,T,C or G
gactggaagagcactgtttcttctccctaccgtaccccaaactcgttggaggctcatcgttcctattcaggcagatgttatcgaggtccgacnnnnnnactccacgtccactaactaattcaaaaagatcggatacgcatgaggct

SEQ ID NO: 6924 - DNA, 146 bp, Artificial Sequence
  Bisulfite Padlock Probe
  misc_feature 94, 95, 96, 97, 98, 99: n = A,T,C or G
gactggaagagcactgtttcttcttttaaaattttaatttataaagttggaggctcatcgttcctattcaggcagatgttatcgaggtccgacnnnnnnaaacgctacgccaaatctaaaacaactgatcggatacgcatgaggct

SEQ ID NO: 6925 - DNA, 146 bp, Artificial Sequence
  Bisulfite Padlock Probe
  misc_feature 94, 95, 96, 97, 98, 99: n = A,T,C or G
gactggaagagcactgtttcttcttttaaaattttaatttataaagttggaggctcatcgttcctattcaggcagatgttatcgaggtccgacnnnnnnaaacgctacgccgaatctaaaacaactgatcggatacgcatgaggct

SEQ ID NO: 6926 - DNA, 146 bp, Artificial Sequence
  Bisulfite Padlock Probe
  misc_feature 93, 94, 95, 96, 97, 98: n = A,T,C or G
gactggaagagcactgtttctttatctcccaattaaatatacttgttggaggctcatcgttcctattcaggcagatgttatcgaggtccgacnnnnnncaaaaacacaccctcccctctttcctccgatcggatacgcatgaggct

SEQ ID NO: 6927 - DNA, 146 bp, Artificial Sequence
  Bisulfite Padlock Probe
  misc_feature 93, 94, 95, 96, 97, 98: n = A,T,C or G
gactggaagagcactgtttctttcccccaattttaattccaaaagttggaggctcatcgttcctattcaggcagatgttatcgaggtccgacnnnnnnaaaacctcaaaaaactccatatctaaaagatcggatacgcatgaggct

SEQ ID NO: 6928 - DNA, 146 bp, Artificial Sequence
  Bisulfite Padlock Probe
  misc_feature 93, 94, 95, 96, 97, 98: n = A,T,C or G
gactggaagagcactgtttctttcccccaattttaattccaaaagttggaggctcatcgttcctattcaggcagatgttatcgaggtccgacnnnnnnaaaacctcgaaaaactccatatctaaaagatcggatacgcatgaggct

SEQ ID NO: 6929 - DNA, 146 bp, Artificial Sequence
  Bisulfite Padlock Probe
  misc_feature 95, 96, 97, 98, 99, 100: n = A,T,C or G
gactggaagagcactgtttctttcctcctcaacaaccaaataaattgttggaggctcatcgttcctattcaggcagatgttatcgaggtccgacnnnnnnccccaatacgcacaatacaccctaaagatcggatacgcatgaggct

SEQ ID NO: 6930 - DNA, 146 bp, Artificial Sequence
  Bisulfite Padlock Probe
  misc_feature 95, 96, 97, 98, 99, 100: n = A,T,C or G
gactggaagagcactgtttctttcctcctcaacgaccaaataaattgttggaggctcatcgttcctattcaggcagatgttatcgaggtccgacnnnnnnccccaatacgcgcaatacaccctaaagatcggatacgcatgaggct

SEQ ID NO: 6931 - DNA, 146 bp, Artificial Sequence
  Bisulfite Padlock Probe
  misc_feature 93, 94, 95, 96, 97, 98: n = A,T,C or G
gactggaagagcactgtttcttttcgcacaaccaaatataccaagttggaggctcatcgttcctattcaggcagatgttatcgaggtccgacnnnnnntcctcaaatacccccaaaaacaacaaaagatcggatacgcatgaggct

SEQ ID NO: 6932 - DNA, 146 bp, Artificial Sequence
  Bisulfite Padlock Probe
  misc_feature 93, 94, 95, 96, 97, 98: n = A,T,C or G
gactggaagagcactgtttcttttcgcgcaaccaaatataccaagttggaggctcatcgttcctattcaggcagatgttatcgaggtccgacnnnnnntcctcaaatacccccaaaaacaacgaaagatcggatacgcatgaggct

SEQ ID NO: 6933 - DNA, 146 bp, Artificial Sequence
  Bisulfite Padlock Probe
  misc_feature 93, 94, 95, 96, 97, 98: n = A,T,C or G
gactggaagagcactgttttaaaaactaaatctcattttctaccgttggaggctcatcgttcctattcaggcagatgttatcgaggtccgacnnnnnnctaaaacctcccaactcccaaaaactaagatcggatacgcatgaggct

SEQ ID NO: 6934 - DNA, 146 bp, Artificial Sequence
  Bisulfite Padlock Probe
  misc_feature 96, 97, 98, 99, 100, 101: n = A,T,C or G
gactggaagagcactgttttaaaaataaaacaatcaacaataaatttgttggaggctcatcgttcctattcaggcagatgttatcgaggtccgacnnnnnnaaaacgaaaatacgcgacaaatctagatcggatacgcatgaggct

SEQ ID NO: 6935 - DNA, 146 bp, Artificial Sequence
  Bisulfite Padlock Probe
  misc_feature 96, 97, 98, 99, 100, 101: n = A,T,C or G
gactggaagagcactgttttaaaaataaaacgatcaacaataaatttgttggaggctcatcgttcctattcaggcagatgttatcgaggtccgacnnnnnnaaaacgaaaatacgcgacgaatctagatcggatacgcatgaggct

SEQ ID NO: 6936 - DNA, 146 bp, Artificial Sequence
  Bisulfite Padlock Probe
  misc_feature 92, 93, 94, 95, 96, 97: n = A,T,C or G
gactggaagagcactgttttaaaaataaacgtatctacataccgttggaggctcatcgttcctattcaggcagatgttatcgaggtccgacnnnnnntactctacgctacgaaccgacacaaaaaagatcggatacgcatgaggct

SEQ ID NO: 6937 - DNA, 146 bp, Artificial Sequence
  Bisulfite Padlock Probe
  misc_feature 92, 93, 94, 95, 96, 97: n = A,T,C or G
gactggaagagcactgttttaaaaataaacgtatctacgtaccgttggaggctcatcgttcctattcaggcagatgttatcgaggtccgacnnnnnntactctacgctacgaaccgacacgaaaaagatcggatacgcatgaggct

SEQ ID NO: 6938 - DNA, 146 bp, Artificial Sequence
  Bisulfite Padlock Probe
  misc_feature 92, 93, 94, 95, 96, 97: n = A,T,C or G
gactggaagagcactgttttaaaacatcctcttcctacaaacagttggaggctcatcgttcctattcaggcagatgttatcgaggtccgacnnnnnntaaaaaccccaaaaacactcccccaaatcgatcggatacgcatgaggct

SEQ ID NO: 6939 - DNA, 146 bp, Artificial Sequence
  Bisulfite Padlock Probe
  misc_feature 92, 93, 94, 95, 96, 97: n = A,T,C or G
gactggaagagcactgttttaaaacgtcctcttcctacaaacagttggaggctcatcgttcctattcaggcagatgttatcgaggtccgacnnnnnntaaaaaccccaaaaacgctcccccaaatcgatcggatacgcatgaggct

SEQ ID NO: 6940 - DNA, 146 bp, Artificial Sequence
  Bisulfite Padlock Probe
  misc_feature 95, 96, 97, 98, 99, 100: n = A,T,C or G
gactggaagagcactgttttaaaatacactaacaaacaatataaacgttggaggctcatcgttcctattcaggcagatgttatcgaggtccgacnnnnnnccaacaaaaaccgcgcccaaaatctagatcggatacgcatgaggct

SEQ ID NO: 6941 - DNA, 146 bp, Artificial Sequence
  Bisulfite Padlock Probe
  misc_feature 95, 96, 97, 98, 99, 100: n = A,T,C or G
gactggaagagcactgttttaaaatacactaacaaacgatataaacgttggaggctcatcgttcctattcaggcagatgttatcgaggtccgacnnnnnnccaacaaaaaccgcgcccgaaatctagatcggatacgcatgaggct

SEQ ID NO: 6942 - DNA, 146 bp, Artificial Sequence
  Bisulfite Padlock Probe
  misc_feature 92, 93, 94, 95, 96, 97: n = A,T,C or G
gactggaagagcactgttttaaaataccaaacactattctctagttggaggctcatcgttcctattcaggcagatgttatcgaggtccgacnnnnnnatctctcccactactaactcactttattcgatcggatacgcatgaggct

SEQ ID NO: 6943 - DNA, 146 bp, Artificial Sequence
  Bisulfite Padlock Probe
  misc_feature 92, 93, 94, 95, 96, 97: n = A,T,C or G
gactggaagagcactgttttaaaataccgaacactattctctagttggaggctcatcgttcctattcaggcagatgttatcgaggtccgacnnnnnnatctctcccactactaactcactttattcgatcggatacgcatgaggct

SEQ ID NO: 6944 - DNA, 146 bp, Artificial Sequence
  Bisulfite Padlock Probe
  misc_feature 92, 93, 94, 95, 96, 97: n = A,T,C or G
gactggaagagcactgttttaaaatcccctctcttcctaaaaagttggaggctcatcgttcctattcaggcagatgttatcgaggtccgacnnnnnncaaaaccaataccctcctatccctccaccgatcggatacgcatgaggct

SEQ ID NO: 6945 - DNA, 146 bp, Artificial Sequence
  Bisulfite Padlock Probe
  misc_feature 95, 96, 97, 98, 99, 100: n = A,T,C or G
gactggaagagcactgttttaaacaaacgataaaaacaacctaaaagttggaggctcatcgttcctattcaggcagatgttatcgaggtccgacnnnnnncacacgactacgaccacaactaaaaagatcggatacgcatgaggct

SEQ ID NO: 6946 - DNA, 146 bp, Artificial Sequence
  Bisulfite Padlock Probe
  misc_feature 95, 96, 97, 98, 99, 100: n = A,T,C or G
gactggaagagcactgttttaaacaaacgataaaaacgacctaaaagttggaggctcatcgttcctattcaggcagatgttatcgaggtccgacnnnnnncacacgactacgaccacgactaaaaagatcggatacgcatgaggct

SEQ ID NO: 6947 - DNA, 146 bp, Artificial Sequence
  Bisulfite Padlock Probe
  misc_feature 93, 94, 95, 96, 97, 98: n = A,T,C or G
gactggaagagcactgttttaaacaccaaccgctcacaacaaccgttggaggctcatcgttcctattcaggcagatgttatcgaggtccgacnnnnnncaaccgcccaccaaactaataataataagatcggatacgcatgaggct

SEQ ID NO: 6948 - DNA, 146 bp, Artificial Sequence
  Bisulfite Padlock Probe
  misc_feature 93, 94, 95, 96, 97, 98: n = A,T,C or G
gactggaagagcactgttttaaacaccaaccgctcgcaacaaccgttggaggctcatcgttcctattcaggcagatgttatcgaggtccgacnnnnnncaaccgcccaccgaactaataataataagatcggatacgcatgaggct

SEQ ID NO: 6949 - DNA, 146 bp, Artificial Sequence
  Bisulfite Padlock Probe
  misc_feature 92, 93, 94, 95, 96, 97: n = A,T,C or G
gactggaagagcactgttttaaacccacacgcctctcacatccgttggaggctcatcgttcctattcaggcagatgttatcgaggtccgacnnnnnntattattcttattccgtcaaccaaaaccagatcggatacgcatgaggct

SEQ ID NO: 6950 - DNA, 146 bp, Artificial Sequence
  Bisulfite Padlock Probe
  misc_feature 92, 93, 94, 95, 96, 97: n = A,T,C or G
gactggaagagcactgttttaaacccacacgcctctcgcatccgttggaggctcatcgttcctattcaggcagatgttatcgaggtccgacnnnnnntattattcttattccgtcgaccaaaaccagatcggatacgcatgaggct

SEQ ID NO: 6951 - DNA, 146 bp, Artificial Sequence
  Bisulfite Padlock Probe
  misc_feature 92, 93, 94, 95, 96, 97: n = A,T,C or G
gactggaagagcactgttttaaactcctttaaatccaacaaaagttggaggctcatcgttcctattcaggcagatgttatcgaggtccgacnnnnnnaaaaacgaaacaaacacaccaaaaaataagatcggatacgcatgaggct

SEQ ID NO: 6952 - DNA, 146 bp, Artificial Sequence
  Bisulfite Padlock Probe
  misc_feature 92, 93, 94, 95, 96, 97: n = A,T,C or G
gactggaagagcactgttttaaactcctttaaatccgacaaaagttggaggctcatcgttcctattcaggcagatgttatcgaggtccgacnnnnnnaaaaacgaaacaaacacaccgaaaaataagatcggatacgcatgaggct

SEQ ID NO: 6953 - DNA, 146 bp, Artificial Sequence
  Bisulfite Padlock Probe
  misc_feature 94, 95, 96, 97, 98, 99: n = A,T,C or G
gactggaagagcactgttttaaactcgaaaatatcgcaataccccgttggaggctcatcgttcctattcaggcagatgttatcgaggtccgacnnnnnnatcgaacttaatcgaaactccaaaaaagatcggatacgcatgaggct

SEQ ID NO: 6954 - DNA, 146 bp, Artificial Sequence
  Bisulfite Padlock Probe
  misc_feature 94, 95, 96, 97, 98, 99: n = A,T,C or G
gactggaagagcactgttttaaactcgaaaatatcgcgataccccgttggaggctcatcgttcctattcaggcagatgttatcgaggtccgacnnnnnnatcgaacttaatcgaaactccgaaaaagatcggatacgcatgaggct

SEQ ID NO: 6955 - DNA, 146 bp, Artificial Sequence
  Bisulfite Padlock Probe
  misc_feature 92, 93, 94, 95, 96, 97: n = A,T,C or G
gactggaagagcactgttttaaactcgctacacaacaaataacgttggaggctcatcgttcctattcaggcagatgttatcgaggtccgacnnnnnntaacccatatccctctactacgtaaacatgatcggatacgcatgaggct

SEQ ID NO: 6956 - DNA, 146 bp, Artificial Sequence
  Bisulfite Padlock Probe
  misc_feature 92, 93, 94, 95, 96, 97: n = A,T,C or G
gactggaagagcactgttttaaactcgctacgcaacaaataacgttggaggctcatcgttcctattcaggcagatgttatcgaggtccgacnnnnnntaacccatatccctctactacgtaaacgtgatcggatacgcatgaggct

SEQ ID NO: 6957 - DNA, 146 bp, Artificial Sequence
  Bisulfite Padlock Probe
  misc_feature 93, 94, 95, 96, 97, 98: n = A,T,C or G
gactggaagagcactgttttaaacttctcctctactccaacaaagttggaggctcatcgttcctattcaggcagatgttatcgaggtccgacnnnnnnactaacctactacgtaataaacatatacgatcggatacgcatgaggct

SEQ ID NO: 6958 - DNA, 146 bp, Artificial Sequence
  Bisulfite Padlock Probe
  misc_feature 93, 94, 95, 96, 97, 98: n = A,T,C or G
gactggaagagcactgttttaaacttctcctctactccaacaaagttggaggctcatcgttcctattcaggcagatgttatcgaggtccgacnnnnnnactaacctactacgtaataaacgtatacgatcggatacgcatgaggct

SEQ ID NO: 6959 - DNA, 146 bp, Artificial Sequence
  Bisulfite Padlock Probe
  misc_feature 92, 93, 94, 95, 96, 97: n = A,T,C or G
gactggaagagcactgttttaaataatttactttcaataaaaagttggaggctcatcgttcctattcaggcagatgttatcgaggtccgacnnnnnnttaaacacgacaaaataataataactcacgatcggatacgcatgaggct

SEQ ID NO: 6960 - DNA, 146 bp, Artificial Sequence
  Bisulfite Padlock Probe
  misc_feature 92, 93, 94, 95, 96, 97: n = A,T,C or G
gactggaagagcactgttttaaataatttactttcgataaaaagttggaggctcatcgttcctattcaggcagatgttatcgaggtccgacnnnnnnttaaacacgacgaaataataataactcacgatcggatacgcatgaggct

SEQ ID NO: 6961 - DNA, 146 bp, Artificial Sequence
  Bisulfite Padlock Probe
  misc_feature 96, 97, 98, 99, 100, 101: n = A,T,C or G
gactggaagagcactgttttaaattacccctcgaactaaaaacaaacgttggaggctcatcgttcctattcaggcagatgttatcgaggtccgacnnnnnncgacgcaataataactaaaccgacagatcggatacgcatgaggct

SEQ ID NO: 6962 - DNA, 146 bp, Artificial Sequence
  Bisulfite Padlock Probe
  misc_feature 96, 97, 98, 99, 100, 101: n = A,T,C or G
gactggaagagcactgttttaaattacccctcgaactaaaaacgaacgttggaggctcatcgttcctattcaggcagatgttatcgaggtccgacnnnnnncgacgcaataataactaaaccgacggatcggatacgcatgaggct

SEQ ID NO: 6963 - DNA, 146 bp, Artificial Sequence
  Bisulfite Padlock Probe
  misc_feature 92, 93, 94, 95, 96, 97: n = A,T,C or G
gactggaagagcactgttttaacaatttcattaaccactaaaagttggaggctcatcgttcctattcaggcagatgttatcgaggtccgacnnnnnnctctaaacaaacgtaacccaaaaaacaaagatcggatacgcatgaggct

SEQ ID NO: 6964 - DNA, 146 bp, Artificial Sequence
  Bisulfite Padlock Probe
  misc_feature 92, 93, 94, 95, 96, 97: n = A,T,C or G
gactggaagagcactgttttaacaatttcattaaccactaaaagttggaggctcatcgttcctattcaggcagatgttatcgaggtccgacnnnnnnctctaaacaaacgtaacccgaaaaacaaagatcggatacgcatgaggct

SEQ ID NO: 6965 - DNA, 146 bp, Artificial Sequence
  Bisulfite Padlock Probe
  misc_feature 94, 95, 96, 97, 98, 99: n = A,T,C or G
gactggaagagcactgttttaaccaaaacctactaaccccactacgttggaggctcatcgttcctattcaggcagatgttatcgaggtccgacnnnnnnccacttcaactccccaatattcacctcgatcggatacgcatgaggct

SEQ ID NO: 6966 - DNA, 146 bp, Artificial Sequence
  Bisulfite Padlock Probe
  misc_feature 94, 95, 96, 97, 98, 99: n = A,T,C or G
gactggaagagcactgttttaaccaaaacctactaaccccgctacgttggaggctcatcgttcctattcaggcagatgttatcgaggtccgacnnnnnnccacttcaactccccgatattcacctcgatcggatacgcatgaggct

SEQ ID NO: 6967 - DNA, 146 bp, Artificial Sequence
  Bisulfite Padlock Probe
  misc_feature 93, 94, 95, 96, 97, 98: n = A,T,C or G
gactggaagagcactgttttaaccacaacctacaaaaaccatacgttggaggctcatcgttcctattcaggcagatgttatcgaggtccgacnnnnnncccaataaaaccgctaaacactctaaccgatcggatacgcatgaggct

SEQ ID NO: 6968 - DNA, 146 bp, Artificial Sequence
  Bisulfite Padlock Probe
  misc_feature 93, 94, 95, 96, 97, 98: n = A,T,C or G
gactggaagagcactgttttaaccacaacctacgaaaaccatacgttggaggctcatcgttcctattcaggcagatgttatcgaggtccgacnnnnnncccaataaaaccgctaaacgctctaaccgatcggatacgcatgaggct

SEQ ID NO: 6969 - DNA, 146 bp, Artificial Sequence
  Bisulfite Padlock Probe
  misc_feature 92, 93, 94, 95, 96, 97: n = A,T,C or G
gactggaagagcactgttttaacctaactcccgaaaccaaaacgttggaggctcatcgttcctattcaggcagatgttatcgaggtccgacnnnnnncctttaaaacccgcgtcgacaaaacaaacgatcggatacgcatgaggct

SEQ ID NO: 6970 - DNA, 146 bp, Artificial Sequence
  Bisulfite Padlock Probe
  misc_feature 92, 93, 94, 95, 96, 97: n = A,T,C or G
gactggaagagcactgttttaacctaactcccgaaaccgaaacgttggaggctcatcgttcctattcaggcagatgttatcgaggtccgacnnnnnncctttaaaacccgcgtcgacaaaacgaacgatcggatacgcatgaggct

SEQ ID NO: 6971 - DNA, 146 bp, Artificial Sequence
  Bisulfite Padlock Probe
  misc_feature 92, 93, 94, 95, 96, 97: n = A,T,C or G
gactggaagagcactgttttaactatatacaatcccctacttcgttggaggctcatcgttcctattcaggcagatgttatcgaggtccgacnnnnnnttatcaaccctactctttaaaaactaacagatcggatacgcatgaggct

SEQ ID NO: 6972 - DNA, 146 bp, Artificial Sequence
  Bisulfite Padlock Probe
  misc_feature 92, 93, 94, 95, 96, 97: n = A,T,C or G
gactggaagagcactgttttaactccccaaccaaaaactctccgttggaggctcatcgttcctattcaggcagatgttatcgaggtccgacnnnnnnaaaaactaataaccaccaaaacccaactcgatcggatacgcatgaggct

SEQ ID NO: 6973 - DNA, 146 bp, Artificial Sequence
  Bisulfite Padlock Probe
  misc_feature 92, 93, 94, 95, 96, 97: n = A,T,C or G
gactggaagagcactgttttaactccccaaccgaaaactctccgttggaggctcatcgttcctattcaggcagatgttatcgaggtccgacnnnnnnaaaaactaataaccaccgaaacccaactcgatcggatacgcatgaggct

SEQ ID NO: 6974 - DNA, 146 bp, Artificial Sequence
  Bisulfite Padlock Probe
  misc_feature 96, 97, 98, 99, 100, 101: n = A,T,C or G
gactggaagagcactgttttaataatataaatcaattaatttaacttgttggaggctcatcgttcctattcaggcagatgttatcgaggtccgacnnnnnnttatacacatctcatcatttaactagatcggatacgcatgaggct

SEQ ID NO: 6975 - DNA, 146 bp, Artificial Sequence
  Bisulfite Padlock Probe
  misc_feature 96, 97, 98, 99, 100, 101: n = A,T,C or G
gactggaagagcactgttttaataatataaatcaattaatttaacttgttggaggctcatcgttcctattcaggcagatgttatcgaggtccgacnnnnnnttatacacgtctcatcatttaactagatcggatacgcatgaggct

SEQ ID NO: 6976 - DNA, 146 bp, Artificial Sequence
  Bisulfite Padlock Probe
  misc_feature 92, 93, 94, 95, 96, 97: n = A,T,C or G
gactggaagagcactgttttacacaactacaaccatccttaccgttggaggctcatcgttcctattcaggcagatgttatcgaggtccgacnnnnnnaaaaatcctctaaccccaacttttcctaagatcggatacgcatgaggct

SEQ ID NO: 6977 - DNA, 146 bp, Artificial Sequence
  Bisulfite Padlock Probe
  misc_feature 92, 93, 94, 95, 96, 97: n = A,T,C or G
gactggaagagcactgttttacacaactacaaccgtccttaccgttggaggctcatcgttcctattcaggcagatgttatcgaggtccgacnnnnnnaaaaatcctctaaccccgacttttcctaagatcggatacgcatgaggct

SEQ ID NO: 6978 - DNA, 146 bp, Artificial Sequence
  Bisulfite Padlock Probe
  misc_feature 96, 97, 98, 99, 100, 101: n = A,T,C or G
gactggaagagcactgttttacccaacgccaattctctcctcaaaacgttggaggctcatcgttcctattcaggcagatgttatcgaggtccgacnnnnnnctcccaaacctaaaaatacaaattcgatcggatacgcatgaggct

SEQ ID NO: 6979 - DNA, 146 bp, Artificial Sequence
  Bisulfite Padlock Probe
  misc_feature 96, 97, 98, 99, 100, 101: n = A,T,C or G
gactggaagagcactgttttacccaacgccgattctctcctcaaaacgttggaggctcatcgttcctattcaggcagatgttatcgaggtccgacnnnnnnctcccaaacctaaaaatacgaattcgatcggatacgcatgaggct

SEQ ID NO: 6980 - DNA, 146 bp, Artificial Sequence
  Bisulfite Padlock Probe
  misc_feature 92, 93, 94, 95, 96, 97: n = A,T,C or G
gactggaagagcactgttttacccacgcaatccaatctcctacgttggaggctcatcgttcctattcaggcagatgttatcgaggtccgacnnnnnntattcaaactacccaaacacctaaactacgatcggatacgcatgaggct

SEQ ID NO: 6981 - DNA, 146 bp, Artificial Sequence
  Bisulfite Padlock Probe
  misc_feature 92, 93, 94, 95, 96, 97: n = A,T,C or G
gactggaagagcactgttttacccacgcaatccgatctcctacgttggaggctcatcgttcctattcaggcagatgttatcgaggtccgacnnnnnntattcaaactacccaaacgcctaaactacgatcggatacgcatgaggct

SEQ ID NO: 6982 - DNA, 146 bp, Artificial Sequence
  Bisulfite Padlock Probe
  misc_feature 95, 96, 97, 98, 99, 100: n = A,T,C or G
gactggaagagcactgttttacctaatccaaatactacccaactacgttggaggctcatcgttcctattcaggcagatgttatcgaggtccgacnnnnnnaaaaacgccaaaaccgcacttaaaaagatcggatacgcatgaggct

SEQ ID NO: 6983 - DNA, 146 bp, Artificial Sequence
  Bisulfite Padlock Probe
  misc_feature 95, 96, 97, 98, 99, 100: n = A,T,C or G
gactggaagagcactgttttacctaatccaaatactacccaactacgttggaggctcatcgttcctattcaggcagatgttatcgaggtccgacnnnnnnaaaaacgccaaaaccgcgcttaaaaagatcggatacgcatgaggct

SEQ ID NO: 6984 - DNA, 146 bp, Artificial Sequence
  Bisulfite Padlock Probe
  misc_feature 94, 95, 96, 97, 98, 99: n = A,T,C or G
gactggaagagcactgttttactacgaaaaccaccactattactagttggaggctcatcgttcctattcaggcagatgttatcgaggtccgacnnnnnnaccaaatctctcccctctcccaccttcgatcggatacgcatgaggct

SEQ ID NO: 6985 - DNA, 146 bp, Artificial Sequence
  Bisulfite Padlock Probe
  misc_feature 94, 95, 96, 97, 98, 99: n = A,T,C or G
gactggaagagcactgttttactacgaaaaccgccactattactagttggaggctcatcgttcctattcaggcagatgttatcgaggtccgacnnnnnnaccaaatctctcccctctcccaccttcgatcggatacgcatgaggct

SEQ ID NO: 6986 - DNA, 146 bp, Artificial Sequence
  Bisulfite Padlock Probe
  misc_feature 92, 93, 94, 95, 96, 97: n = A,T,C or G
gactggaagagcactgttttactatacgacaacaactatctccgttggaggctcatcgttcctattcaggcagatgttatcgaggtccgacnnnnnnaaaaataaactccccaacaaaaacacaaagatcggatacgcatgaggct

SEQ ID NO: 6987 - DNA, 146 bp, Artificial Sequence
  Bisulfite Padlock Probe
  misc_feature 92, 93, 94, 95, 96, 97: n = A,T,C or G
gactggaagagcactgttttactatacgacgacaactatctccgttggaggctcatcgttcctattcaggcagatgttatcgaggtccgacnnnnnnaaaaataaactccccaacaaaaacgcaaagatcggatacgcatgaggct

SEQ ID NO: 6988 - DNA, 146 bp, Artificial Sequence
  Bisulfite Padlock Probe
  misc_feature 95, 96, 97, 98, 99, 100: n = A,T,C or G
gactggaagagcactgttttataaaaacgaataacctcaaaaactagttggaggctcatcgttcctattcaggcagatgttatcgaggtccgacnnnnnncccctcctctaccaaacccccaaaaagatcggatacgcatgaggct

SEQ ID NO: 6989 - DNA, 146 bp, Artificial Sequence
  Bisulfite Padlock Probe
  misc_feature 95, 96, 97, 98, 99, 100: n = A,T,C or G
gactggaagagcactgttttataaaaacgaataacctcgaaaactagttggaggctcatcgttcctattcaggcagatgttatcgaggtccgacnnnnnncccctcctctaccaaacccccaaaaagatcggatacgcatgaggct

SEQ ID NO: 6990 - DNA, 146 bp, Artificial Sequence
  Bisulfite Padlock Probe
  misc_feature 92, 93, 94, 95, 96, 97: n = A,T,C or G
gactggaagagcactgttttataaaatcaacgcgcgacaccttgttggaggctcatcgttcctattcaggcagatgttatcgaggtccgacnnnnnnataataaatccacatcaaaatatccaaaagatcggatacgcatgaggct

SEQ ID NO: 6991 - DNA, 146 bp, Artificial Sequence
  Bisulfite Padlock Probe
  misc_feature 92, 93, 94, 95, 96, 97: n = A,T,C or G
gactggaagagcactgttttataaaatcaacgcgcgacgccttgttggaggctcatcgttcctattcaggcagatgttatcgaggtccgacnnnnnnataataaatccacatcaaaatatccaaaagatcggatacgcatgaggct

SEQ ID NO: 6992 - DNA, 146 bp, Artificial Sequence
  Bisulfite Padlock Probe
  misc_feature 93, 94, 95, 96, 97, 98: n = A,T,C or G
gactggaagagcactgttttatacaaacgctataatccacctaagttggaggctcatcgttcctattcaggcagatgttatcgaggtccgacnnnnnnacctataaacttttaactacaaactacagatcggatacgcatgaggct

SEQ ID NO: 6993 - DNA, 146 bp, Artificial Sequence
  Bisulfite Padlock Probe
  misc_feature 93, 94, 95, 96, 97, 98: n = A,T,C or G
gactggaagagcactgttttatacaaacgctataatccgcctaagttggaggctcatcgttcctattcaggcagatgttatcgaggtccgacnnnnnnacctataaacttttaactacaaactacagatcggatacgcatgaggct

SEQ ID NO: 6994 - DNA, 146 bp, Artificial Sequence
  Bisulfite Padlock Probe
  misc_feature 94, 95, 96, 97, 98, 99: n = A,T,C or G
gactggaagagcactgttttatacctacctacaaaatatcctcttgttggaggctcatcgttcctattcaggcagatgttatcgaggtccgacnnnnnnaatcccaacatccccaaaaatctaacagatcggatacgcatgaggct

SEQ ID NO: 6995 - DNA, 146 bp, Artificial Sequence
  Bisulfite Padlock Probe
  misc_feature 94, 95, 96, 97, 98, 99: n = A,T,C or G
gactggaagagcactgttttatacctacctacgaaatatcctcttgttggaggctcatcgttcctattcaggcagatgttatcgaggtccgacnnnnnnaatcccaacgtccccaaaaatctaacagatcggatacgcatgaggct

SEQ ID NO: 6996 - DNA, 146 bp, Artificial Sequence
  Bisulfite Padlock Probe
  misc_feature 92, 93, 94, 95, 96, 97: n = A,T,C or G
gactggaagagcactgttttatcccccaccatcctaccaaaacgttggaggctcatcgttcctattcaggcagatgttatcgaggtccgacnnnnnnataattaatcaaccaaacccaactccaaagatcggatacgcatgaggct

SEQ ID NO: 6997 - DNA, 146 bp, Artificial Sequence
  Bisulfite Padlock Probe
  misc_feature 92, 93, 94, 95, 96, 97: n = A,T,C or G
gactggaagagcactgttttatcccccgccatcctaccaaaacgttggaggctcatcgttcctattcaggcagatgttatcgaggtccgacnnnnnnataattaatcgaccaaacccaactccaaagatcggatacgcatgaggct

SEQ ID NO: 6998 - DNA, 146 bp, Artificial Sequence
  Bisulfite Padlock Probe
  misc_feature 96, 97, 98, 99, 100, 101: n = A,T,C or G
gactggaagagcactgttttattacacttaaaacacttaaacataacgttggaggctcatcgttcctattcaggcagatgttatcgaggtccgacnnnnnnaacacaaaaacctccaccctcatccgatcggatacgcatgaggct

SEQ ID NO: 6999 - DNA, 146 bp, Artificial Sequence
  Bisulfite Padlock Probe
  misc_feature 96, 97, 98, 99, 100, 101: n = A,T,C or G
gactggaagagcactgttttattacacttaaaacacttaaacataacgttggaggctcatcgttcctattcaggcagatgttatcgaggtccgacnnnnnnaacgcaaaaacctccaccctcatccgatcggatacgcatgaggct

SEQ ID NO: 7000 - DNA, 146 bp, Artificial Sequence
  Bisulfite Padlock Probe
  misc_feature 92, 93, 94, 95, 96, 97: n = A,T,C or G
gactggaagagcactgttttattttacctattttcctcaaaaagttggaggctcatcgttcctattcaggcagatgttatcgaggtccgacnnnnnnacctctccacctatctacaaatacaacccgatcggatacgcatgaggct

SEQ ID NO: 7001 - DNA, 146 bp, Artificial Sequence
  Bisulfite Padlock Probe
  misc_feature 92, 93, 94, 95, 96, 97: n = A,T,C or G
gactggaagagcactgttttattttacctattttcctcgaaaagttggaggctcatcgttcctattcaggcagatgttatcgaggtccgacnnnnnnacctctccacctatctacgaatacaacccgatcggatacgcatgaggct

SEQ ID NO: 7002 - DNA, 146 bp, Artificial Sequence
  Bisulfite Padlock Probe
  misc_feature 92, 93, 94, 95, 96, 97: n = A,T,C or G
gactggaagagcactgttttcaaaaaccccgtatataacaaacgttggaggctcatcgttcctattcaggcagatgttatcgaggtccgacnnnnnnaaatccatttaataaaatttcaataaaaagatcggatacgcatgaggct

SEQ ID NO: 7003 - DNA, 146 bp, Artificial Sequence
  Bisulfite Padlock Probe
  misc_feature 92, 93, 94, 95, 96, 97: n = A,T,C or G
gactggaagagcactgttttcaaaaaccccgtatataacgaacgttggaggctcatcgttcctattcaggcagatgttatcgaggtccgacnnnnnnaaatccgtttaataaaatttcaataaaaagatcggatacgcatgaggct

SEQ ID NO: 7004 - DNA, 146 bp, Artificial Sequence
  Bisulfite Padlock Probe
  misc_feature 92, 93, 94, 95, 96, 97: n = A,T,C or G
gactggaagagcactgttttcaacctcccctcctaccctaaaagttggaggctcatcgttcctattcaggcagatgttatcgaggtccgacnnnnnnccctaaatcaacgcaactaaaacaaaaccgatcggatacgcatgaggct

SEQ ID NO: 7005 - DNA, 146 bp, Artificial Sequence
  Bisulfite Padlock Probe
  misc_feature 95, 96, 97, 98, 99, 100: n = A,T,C or G
gactggaagagcactgttttcaactacaccttaaacctcttcatacgttggaggctcatcgttcctattcaggcagatgttatcgaggtccgacnnnnnnacaaatccaaaacaccaataaaaatcgatcggatacgcatgaggct

SEQ ID NO: 7006 - DNA, 146 bp, Artificial Sequence
  Bisulfite Padlock Probe
  misc_feature 95, 96, 97, 98, 99, 100: n = A,T,C or G
gactggaagagcactgttttcaactacaccttaaacctcttcatacgttggaggctcatcgttcctattcaggcagatgttatcgaggtccgacnnnnnnacgaatccaaaacaccaataaaaatcgatcggatacgcatgaggct

SEQ ID NO: 7007 - DNA, 146 bp, Artificial Sequence
  Bisulfite Padlock Probe
  misc_feature 95, 96, 97, 98, 99, 100: n = A,T,C or G
gactggaagagcactgttttcaactacatctcgacctacaaaccccgttggaggctcatcgttcctattcaggcagatgttatcgaggtccgacnnnnnnaaaaccgaaccctccaaactcataaagatcggatacgcatgaggct

SEQ ID NO: 7008 - DNA, 146 bp, Artificial Sequence
  Bisulfite Padlock Probe
  misc_feature 95, 96, 97, 98, 99, 100: n = A,T,C or G
gactggaagagcactgttttcaactacatctcgacctacgaaccccgttggaggctcatcgttcctattcaggcagatgttatcgaggtccgacnnnnnnaaaaccgaaccctccaaactcgtaaagatcggatacgcatgaggct

SEQ ID NO: 7009 - DNA, 146 bp, Artificial Sequence
  Bisulfite Padlock Probe
  misc_feature 92, 93, 94, 95, 96, 97: n = A,T,C or G
gactggaagagcactgttttcaactccttaacatcctcctcctgttggaggctcatcgttcctattcaggcagatgttatcgaggtccgacnnnnnnccctaataacatccaattaatcctaaaaagatcggatacgcatgaggct

SEQ ID NO: 7010 - DNA, 146 bp, Artificial Sequence
  Bisulfite Padlock Probe
  misc_feature 92, 93, 94, 95, 96, 97: n = A,T,C or G
gactggaagagcactgttttcaactccttaacgtcctcctcctgttggaggctcatcgttcctattcaggcagatgttatcgaggtccgacnnnnnnccctaataacgtccaattaatcctaaaaagatcggatacgcatgaggct

SEQ ID NO: 7011 - DNA, 146 bp, Artificial Sequence
  Bisulfite Padlock Probe
  misc_feature 92, 93, 94, 95, 96, 97: n = A,T,C or G
gactggaagagcactgttttcaccaacgaactcaaccacctacgttggaggctcatcgttcctattcaggcagatgttatcgaggtccgacnnnnnncctactactactactactcctcaaaaactgatcggatacgcatgaggct

SEQ ID NO: 7012 - DNA, 146 bp, Artificial Sequence
  Bisulfite Padlock Probe
  misc_feature 92, 93, 94, 95, 96, 97: n = A,T,C or G
gactggaagagcactgttttcaccaacgaactcaaccgcctacgttggaggctcatcgttcctattcaggcagatgttatcgaggtccgacnnnnnncctactactactactactcctcgaaaactgatcggatacgcatgaggct

SEQ ID NO: 7013 - DNA, 146 bp, Artificial Sequence
  Bisulfite Padlock Probe
  misc_feature 92, 93, 94, 95, 96, 97: n = A,T,C or G
gactggaagagcactgttttcataatataatccaaaatcaaacgttggaggctcatcgttcctattcaggcagatgttatcgaggtccgacnnnnnnacccgaattaaaacatccaaccctacaacgatcggatacgcatgaggct

SEQ ID NO: 7014 - DNA, 146 bp, Artificial Sequence
  Bisulfite Padlock Probe
  misc_feature 92, 93, 94, 95, 96, 97: n = A,T,C or G
gactggaagagcactgttttcataatataatccaaaatcgaacgttggaggctcatcgttcctattcaggcagatgttatcgaggtccgacnnnnnnacccgaattaaaacgtccaaccctacaacgatcggatacgcatgaggct

SEQ ID NO: 7015 - DNA, 146 bp, Artificial Sequence
  Bisulfite Padlock Probe
  misc_feature 92, 93, 94, 95, 96, 97: n = A,T,C or G
gactggaagagcactgttttcccaatcaaatcccaaaacccccgttggaggctcatcgttcctattcaggcagatgttatcgaggtccgacnnnnnnaaaacgaataaactccaaacccgccaaaagatcggatacgcatgaggct

SEQ ID NO: 7016 - DNA, 146 bp, Artificial Sequence
  Bisulfite Padlock Probe
  misc_feature 92, 93, 94, 95, 96, 97: n = A,T,C or G
gactggaagagcactgttttcccgatcaaatcccaaaacccccgttggaggctcatcgttcctattcaggcagatgttatcgaggtccgacnnnnnnaaaacgaataaactccaaacccgccgaaagatcggatacgcatgaggct

SEQ ID NO: 7017 - DNA, 146 bp, Artificial Sequence
  Bisulfite Padlock Probe
  misc_feature 94, 95, 96, 97, 98, 99: n = A,T,C or G
gactggaagagcactgttttcccttcaataacctacacaaaatacgttggaggctcatcgttcctattcaggcagatgttatcgaggtccgacnnnnnnctacgacataaaatacactcctaatacgatcggatacgcatgaggct

SEQ ID NO: 7018 - DNA, 146 bp, Artificial Sequence
  Bisulfite Padlock Probe
  misc_feature 94, 95, 96, 97, 98, 99: n = A,T,C or G
gactggaagagcactgttttcccttcaataacctacgcaaaatacgttggaggctcatcgttcctattcaggcagatgttatcgaggtccgacnnnnnnctacgacataaaatacgctcctaatacgatcggatacgcatgaggct

SEQ ID NO: 7019 - DNA, 146 bp, Artificial Sequence
  Bisulfite Padlock Probe
  misc_feature 95, 96, 97, 98, 99, 100: n = A,T,C or G
gactggaagagcactgttttcctaactaccaatcaaattctctaatgttggaggctcatcgttcctattcaggcagatgttatcgaggtccgacnnnnnnaataaacccaatcgctacgccaactcgatcggatacgcatgaggct

SEQ ID NO: 7020 - DNA, 146 bp, Artificial Sequence
  Bisulfite Padlock Probe
  misc_feature 95, 96, 97, 98, 99, 100: n = A,T,C or G
gactggaagagcactgttttcctaactaccgatcaaattctctaatgttggaggctcatcgttcctattcaggcagatgttatcgaggtccgacnnnnnnaataaacccaatcgctacgccgactcgatcggatacgcatgaggct

SEQ ID NO: 7021 - DNA, 146 bp, Artificial Sequence
  Bisulfite Padlock Probe
  misc_feature 92, 93, 94, 95, 96, 97: n = A,T,C or G
gactggaagagcactgttttcctattcaacaaatacatctcacgttggaggctcatcgttcctattcaggcagatgttatcgaggtccgacnnnnnnacaactaataaaactaaaactccctaaccgatcggatacgcatgaggct

SEQ ID NO: 7022 - DNA, 146 bp, Artificial Sequence
  Bisulfite Padlock Probe
  misc_feature 93, 94, 95, 96, 97, 98: n = A,T,C or G
gactggaagagcactgttttcctcactcaataaactatccctacgttggaggctcatcgttcctattcaggcagatgttatcgaggtccgacnnnnnncccctaattaaataaaactccaatccccgatcggatacgcatgaggct

SEQ ID NO: 7023 - DNA, 146 bp, Artificial Sequence
  Bisulfite Padlock Probe
  misc_feature 94, 95, 96, 97, 98, 99: n = A,T,C or G
gactggaagagcactgttttcctccactaaaccccgtcaaaaatagttggaggctcatcgttcctattcaggcagatgttatcgaggtccgacnnnnnnaaaaataccccctaaacacaaacccccgatcggatacgcatgaggct

SEQ ID NO: 7024 - DNA, 146 bp, Artificial Sequence
  Bisulfite Padlock Probe
  misc_feature 94, 95, 96, 97, 98, 99: n = A,T,C or G
gactggaagagcactgttttcctccactaaaccccgtcgaaaatagttggaggctcatcgttcctattcaggcagatgttatcgaggtccgacnnnnnnaaaaataccccctaaacgcaaacccccgatcggatacgcatgaggct

SEQ ID NO: 7025 - DNA, 146 bp, Artificial Sequence
  Bisulfite Padlock Probe
  misc_feature 92, 93, 94, 95, 96, 97: n = A,T,C or G
gactggaagagcactgttttccttccctccttccctttccctcgttggaggctcatcgttcctattcaggcagatgttatcgaggtccgacnnnnnnaacccaaatcataaaacccaaaataaacagatcggatacgcatgaggct

SEQ ID NO: 7026 - DNA, 146 bp, Artificial Sequence
  Bisulfite Padlock Probe
  misc_feature 95, 96, 97, 98, 99, 100: n = A,T,C or G
gactggaagagcactgttttccttcttccccttatccaacctcaccgttggaggctcatcgttcctattcaggcagatgttatcgaggtccgacnnnnnncgatccttactatcaacaacctttccgatcggatacgcatgaggct

SEQ ID NO: 7027 - DNA, 146 bp, Artificial Sequence
  Bisulfite Padlock Probe
  misc_feature 95, 96, 97, 98, 99, 100: n = A,T,C or G
gactggaagagcactgttttccttcttccccttatccgacctcaccgttggaggctcatcgttcctattcaggcagatgttatcgaggtccgacnnnnnncgatccttactatcaacgacctttccgatcggatacgcatgaggct

SEQ ID NO: 7028 - DNA, 146 bp, Artificial Sequence
  Bisulfite Padlock Probe
  misc_feature 93, 94, 95, 96, 97, 98: n = A,T,C or G
gactggaagagcactgttttcgacaccatcctctactactatcagttggaggctcatcgttcctattcaggcagatgttatcgaggtccgacnnnnnncactaccgaccgcgaacaaacaaaactagatcggatacgcatgaggct

SEQ ID NO: 7029 - DNA, 146 bp, Artificial Sequence
  Bisulfite Padlock Probe
  misc_feature 92, 93, 94, 95, 96, 97: n = A,T,C or G
gactggaagagcactgttttcgacctcccctcctaccctaaaagttggaggctcatcgttcctattcaggcagatgttatcgaggtccgacnnnnnnccctaaatcaacgcaactaaaacgaaaccgatcggatacgcatgaggct

SEQ ID NO: 7030 - DNA, 146 bp, Artificial Sequence
  Bisulfite Padlock Probe
  misc_feature 93, 94, 95, 96, 97, 98: n = A,T,C or G
gactggaagagcactgttttcgacgccatcctctactactatcagttggaggctcatcgttcctattcaggcagatgttatcgaggtccgacnnnnnncactaccgaccgcgaacgaacaaaactagatcggatacgcatgaggct

SEQ ID NO: 7031 - DNA, 146 bp, Artificial Sequence
  Bisulfite Padlock Probe
  misc_feature 92, 93, 94, 95, 96, 97: n = A,T,C or G
gactggaagagcactgttttcgccgatacccgaaacccaaaaagttggaggctcatcgttcctattcaggcagatgttatcgaggtccgacnnnnnnaaatacgaccactacaaacccttccactagatcggatacgcatgaggct

SEQ ID NO: 7032 - DNA, 146 bp, Artificial Sequence
  Bisulfite Padlock Probe
  misc_feature 92, 93, 94, 95, 96, 97: n = A,T,C or G
gactggaagagcactgttttcgccgatacccgaaacccgaaaagttggaggctcatcgttcctattcaggcagatgttatcgaggtccgacnnnnnnaaatacgaccgctacaaacccttccactagatcggatacgcatgaggct

SEQ ID NO: 7033 - DNA, 146 bp, Artificial Sequence
  Bisulfite Padlock Probe
  misc_feature 94, 95, 96, 97, 98, 99: n = A,T,C or G
gactggaagagcactgttttcgcgcgcaaaaccctaaaacttaaagttggaggctcatcgttcctattcaggcagatgttatcgaggtccgacnnnnnntcgaaactacacccccataaactacccgatcggatacgcatgaggct

SEQ ID NO: 7034 - DNA, 146 bp, Artificial Sequence
  Bisulfite Padlock Probe
  misc_feature 94, 95, 96, 97, 98, 99: n = A,T,C or G
gactggaagagcactgttttcgcgcgcgaaaccctaaaacttaaagttggaggctcatcgttcctattcaggcagatgttatcgaggtccgacnnnnnntcgaaactacacccccgtaaactacccgatcggatacgcatgaggct

SEQ ID NO: 7035 - DNA, 146 bp, Artificial Sequence
  Bisulfite Padlock Probe
  misc_feature 95, 96, 97, 98, 99, 100: n = A,T,C or G
gactggaagagcactgttttcgtactaacctcatcccctaaaccccgttggaggctcatcgttcctattcaggcagatgttatcgaggtccgacnnnnnnataatatcataccttccaaactcctcgatcggatacgcatgaggct

SEQ ID NO: 7036 - DNA, 146 bp, Artificial Sequence
  Bisulfite Padlock Probe
  misc_feature 95, 96, 97, 98, 99, 100: n = A,T,C or G
gactggaagagcactgttttcgtactaacctcgtcccctaaaccccgttggaggctcatcgttcctattcaggcagatgttatcgaggtccgacnnnnnnataatatcataccttccgaactcctcgatcggatacgcatgaggct

SEQ ID NO: 7037 - DNA, 146 bp, Artificial Sequence
  Bisulfite Padlock Probe
  misc_feature 92, 93, 94, 95, 96, 97: n = A,T,C or G
gactggaagagcactgttttctaaaaattaaacaaaaccaaacgttggaggctcatcgttcctattcaggcagatgttatcgaggtccgacnnnnnnacaaccatttattcctaataaaccccaccgatcggatacgcatgaggct

SEQ ID NO: 7038 - DNA, 146 bp, Artificial Sequence
  Bisulfite Padlock Probe
  misc_feature 96, 97, 98, 99, 100, 101: n = A,T,C or G
gactggaagagcactgttttctcaacaacaaataaataaaccaaaacgttggaggctcatcgttcctattcaggcagatgttatcgaggtccgacnnnnnncgaactccccgaccaaaaccttctcgatcggatacgcatgaggct

SEQ ID NO: 7039 - DNA, 146 bp, Artificial Sequence
  Bisulfite Padlock Probe
  misc_feature 92, 93, 94, 95, 96, 97: n = A,T,C or G
gactggaagagcactgttttctcctcccaaacccaaaacaaaagttggaggctcatcgttcctattcaggcagatgttatcgaggtccgacnnnnnnaatttacttaactcctcttcttccaaacagatcggatacgcatgaggct

SEQ ID NO: 7040 - DNA, 146 bp, Artificial Sequence
  Bisulfite Padlock Probe
  misc_feature 94, 95, 96, 97, 98, 99: n = A,T,C or G
gactggaagagcactgttttctcctcctactcccgaaacaccaatgttggaggctcatcgttcctattcaggcagatgttatcgaggtccgacnnnnnncccgaacgaccgaactacacctaaaaagatcggatacgcatgaggct

SEQ ID NO: 7041 - DNA, 146 bp, Artificial Sequence
  Bisulfite Padlock Probe
  misc_feature 94, 95, 96, 97, 98, 99: n = A,T,C or G
gactggaagagcactgttttctcctcctactcccgaaacgccaatgttggaggctcatcgttcctattcaggcagatgttatcgaggtccgacnnnnnncccgaacgaccgaactacgcctaaaaagatcggatacgcatgaggct

SEQ ID NO: 7042 - DNA, 146 bp, Artificial Sequence
  Bisulfite Padlock Probe
  misc_feature 93, 94, 95, 96, 97, 98: n = A,T,C or G
gactggaagagcactgttttctcgaatctctttaattccactacgttggaggctcatcgttcctattcaggcagatgttatcgaggtccgacnnnnnnaaataaaactaataacgaaaacaaaaccgatcggatacgcatgaggct

SEQ ID NO: 7043 - DNA, 146 bp, Artificial Sequence
  Bisulfite Padlock Probe
  misc_feature 93, 94, 95, 96, 97, 98: n = A,T,C or G
gactggaagagcactgttttctcgaatctctttaattccgctacgttggaggctcatcgttcctattcaggcagatgttatcgaggtccgacnnnnnnaaataaaactaataacgaaaacgaaaccgatcggatacgcatgaggct

SEQ ID NO: 7044 - DNA, 146 bp, Artificial Sequence
  Bisulfite Padlock Probe
  misc_feature 96, 97, 98, 99, 100, 101: n = A,T,C or G
gactggaagagcactgttttctcgacaacaaataaataaaccaaaacgttggaggctcatcgttcctattcaggcagatgttatcgaggtccgacnnnnnncgaactccccgaccgaaaccttctcgatcggatacgcatgaggct

SEQ ID NO: 7045 - DNA, 146 bp, Artificial Sequence
  Bisulfite Padlock Probe
  misc_feature 96, 97, 98, 99, 100, 101: n = A,T,C or G
gactggaagagcactgttttctcgactttaaaccaaattaaaactacgttggaggctcatcgttcctattcaggcagatgttatcgaggtccgacnnnnnnaaaaacactaacaaaccacttctacgatcggatacgcatgaggct

SEQ ID NO: 7046 - DNA, 146 bp, Artificial Sequence
  Bisulfite Padlock Probe
  misc_feature 96, 97, 98, 99, 100, 101: n = A,T,C or G
gactggaagagcactgttttctcgactttaaaccgaattaaaactacgttggaggctcatcgttcctattcaggcagatgttatcgaggtccgacnnnnnnaaaaacgctaacaaaccacttctacgatcggatacgcatgaggct

SEQ ID NO: 7047 - DNA, 146 bp, Artificial Sequence
  Bisulfite Padlock Probe
  misc_feature 94, 95, 96, 97, 98, 99: n = A,T,C or G
gactggaagagcactgttttctctataaaccacatcataaaccacgttggaggctcatcgttcctattcaggcagatgttatcgaggtccgacnnnnnnaaactaaactacaccaaaaccttctacgatcggatacgcatgaggct

SEQ ID NO: 7048 - DNA, 146 bp, Artificial Sequence
  Bisulfite Padlock Probe
  misc_feature 94, 95, 96, 97, 98, 99: n = A,T,C or G
gactggaagagcactgttttctctataaaccacatcataaaccacgttggaggctcatcgttcctattcaggcagatgttatcgaggtccgacnnnnnnaaactaaactacgccaaaaccttctacgatcggatacgcatgaggct

SEQ ID NO: 7049 - DNA, 146 bp, Artificial Sequence
  Bisulfite Padlock Probe
  misc_feature 92, 93, 94, 95, 96, 97: n = A,T,C or G
gactggaagagcactgttttctctcaaccctcccctcctcatcgttggaggctcatcgttcctattcaggcagatgttatcgaggtccgacnnnnnnaccgcacctaatactactattaccataacgatcggatacgcatgaggct

SEQ ID NO: 7050 - DNA, 146 bp, Artificial Sequence
  Bisulfite Padlock Probe
  misc_feature 92, 93, 94, 95, 96, 97: n = A,T,C or G
gactggaagagcactgttttctctcgaccctcccctcctcatcgttggaggctcatcgttcctattcaggcagatgttatcgaggtccgacnnnnnnaccgcgcctaatactactattaccataacgatcggatacgcatgaggct

SEQ ID NO: 7051 - DNA, 146 bp, Artificial Sequence
  Bisulfite Padlock Probe
  misc_feature 96, 97, 98, 99, 100, 101: n = A,T,C or G
gactggaagagcactgttttcttaacgaaaatacccatcttaatatcgttggaggctcatcgttcctattcaggcagatgttatcgaggtccgacnnnnnnacaatcaccaaactaaaaacaaaacgatcggatacgcatgaggct

SEQ ID NO: 7052 - DNA, 146 bp, Artificial Sequence
  Bisulfite Padlock Probe
  misc_feature 96, 97, 98, 99, 100, 101: n = A,T,C or G
gactggaagagcactgttttcttaacgaaaatacccgtcttaatatcgttggaggctcatcgttcctattcaggcagatgttatcgaggtccgacnnnnnnacaatcaccgaactaaaaacaaaacgatcggatacgcatgaggct

SEQ ID NO: 7053 - DNA, 146 bp, Artificial Sequence
  Bisulfite Padlock Probe
  misc_feature 92, 93, 94, 95, 96, 97: n = A,T,C or G
gactggaagagcactgttttcttactccctcccccatcccaccgttggaggctcatcgttcctattcaggcagatgttatcgaggtccgacnnnnnnaaatacaactttccgacacctaaaccttcgatcggatacgcatgaggct

SEQ ID NO: 7054 - DNA, 146 bp, Artificial Sequence
  Bisulfite Padlock Probe
  misc_feature 92, 93, 94, 95, 96, 97: n = A,T,C or G
gactggaagagcactgttttcttactccctcccccatcccaccgttggaggctcatcgttcctattcaggcagatgttatcgaggtccgacnnnnnnaaatacaactttccgacgcctaaaccttcgatcggatacgcatgaggct

SEQ ID NO: 7055 - DNA, 146 bp, Artificial Sequence
  Bisulfite Padlock Probe
  misc_feature 94, 95, 96, 97, 98, 99: n = A,T,C or G
gactggaagagcactgtttttaaaaacaattccccaaatccccaagttggaggctcatcgttcctattcaggcagatgttatcgaggtccgacnnnnnngcttatacctcgacgcgaaacactaccgatcggatacgcatgaggct

SEQ ID NO: 7056 - DNA, 146 bp, Artificial Sequence
  Bisulfite Padlock Probe
  misc_feature 94, 95, 96, 97, 98, 99: n = A,T,C or G
gactggaagagcactgtttttaaaaacaattccccaaatccccaagttggaggctcatcgttcctattcaggcagatgttatcgaggtccgacnnnnnngcttatacctcgacgcgaaacgctaccgatcggatacgcatgaggct

SEQ ID NO: 7057 - DNA, 146 bp, Artificial Sequence
  Bisulfite Padlock Probe
  misc_feature 92, 93, 94, 95, 96, 97: n = A,T,C or G
gactggaagagcactgtttttaaaacttcgtaaccaataaaaagttggaggctcatcgttcctattcaggcagatgttatcgaggtccgacnnnnnnaacaacgctattataacctcaaaaataaagatcggatacgcatgaggct

SEQ ID NO: 7058 - DNA, 146 bp, Artificial Sequence
  Bisulfite Padlock Probe
  misc_feature 92, 93, 94, 95, 96, 97: n = A,T,C or G
gactggaagagcactgtttttaaaacttcgtaaccgataaaaagttggaggctcatcgttcctattcaggcagatgttatcgaggtccgacnnnnnnaacaacgctattataacctcgaaaataaagatcggatacgcatgaggct

SEQ ID NO: 7059 - DNA, 146 bp, Artificial Sequence
  Bisulfite Padlock Probe
  misc_feature 93, 94, 95, 96, 97, 98: n = A,T,C or G
gactggaagagcactgtttttaaataactcatcgcacccataccgttggaggctcatcgttcctattcaggcagatgttatcgaggtccgacnnnnnnaataaaaacctcaaccctactatacaccgatcggatacgcatgaggct

SEQ ID NO: 7060 - DNA, 146 bp, Artificial Sequence
  Bisulfite Padlock Probe
  misc_feature 93, 94, 95, 96, 97, 98: n = A,T,C or G
gactggaagagcactgtttttaaataactcatcgcgcccataccgttggaggctcatcgttcctattcaggcagatgttatcgaggtccgacnnnnnnaataaaaacctcgaccctactatacaccgatcggatacgcatgaggct

SEQ ID NO: 7061 - DNA, 146 bp, Artificial Sequence
  Bisulfite Padlock Probe
  misc_feature 92, 93, 94, 95, 96, 97: n = A,T,C or G
gactggaagagcactgtttttaatcccgcgaaacaacgaccacgttggaggctcatcgttcctattcaggcagatgttatcgaggtccgacnnnnnnaaacaccgcgaaacgaacaaaatcaattcgatcggatacgcatgaggct

SEQ ID NO: 7062 - DNA, 146 bp, Artificial Sequence
  Bisulfite Padlock Probe
  misc_feature 92, 93, 94, 95, 96, 97: n = A,T,C or G
gactggaagagcactgtttttaatcccgcgaaacaacgaccgcgttggaggctcatcgttcctattcaggcagatgttatcgaggtccgacnnnnnnaaacaccgcgaaacgaacgaaatcaattcgatcggatacgcatgaggct

SEQ ID NO: 7063 - DNA, 146 bp, Artificial Sequence
  Bisulfite Padlock Probe
  misc_feature 95, 96, 97, 98, 99, 100: n = A,T,C or G
gactggaagagcactgtttttaatccgaaacaaaaaacactaaaaagttggaggctcatcgttcctattcaggcagatgttatcgaggtccgacnnnnnnactacacttatatataaatatatcccgatcggatacgcatgaggct

SEQ ID NO: 7064 - DNA, 146 bp, Artificial Sequence
  Bisulfite Padlock Probe
  misc_feature 95, 96, 97, 98, 99, 100: n = A,T,C or G
gactggaagagcactgtttttaatccgaaacgaaaaacactaaaaagttggaggctcatcgttcctattcaggcagatgttatcgaggtccgacnnnnnnactacgcttatatataaatatatcccgatcggatacgcatgaggct

SEQ ID NO: 7065 - DNA, 146 bp, Artificial Sequence
  Bisulfite Padlock Probe
  misc_feature 92, 93, 94, 95, 96, 97: n = A,T,C or G
gactggaagagcactgtttttacaacgtctaaacaaataaaaagttggaggctcatcgttcctattcaggcagatgttatcgaggtccgacnnnnnnaaaatcaaataaaaccccaaaaccctaaagatcggatacgcatgaggct

SEQ ID NO: 7066 - DNA, 146 bp, Artificial Sequence
  Bisulfite Padlock Probe
  misc_feature 92, 93, 94, 95, 96, 97: n = A,T,C or G
gactggaagagcactgtttttacaacgtctaaacgaataaaaagttggaggctcatcgttcctattcaggcagatgttatcgaggtccgacnnnnnnaaaatcaaataaaaccccgaaaccctaaagatcggatacgcatgaggct

SEQ ID NO: 7067 - DNA, 146 bp, Artificial Sequence
  Bisulfite Padlock Probe
  misc_feature 94, 95, 96, 97, 98, 99: n = A,T,C or G
gactggaagagcactgtttttaccctaaacaccaaaacaaaacccgttggaggctcatcgttcctattcaggcagatgttatcgaggtccgacnnnnnnaaaaactataaataaaaatacaaaaaagatcggatacgcatgaggct

SEQ ID NO: 7068 - DNA, 146 bp, Artificial Sequence
  Bisulfite Padlock Probe
  misc_feature 94, 95, 96, 97, 98, 99: n = A,T,C or G
gactggaagagcactgtttttaccctaaacaccgaaacaaaacccgttggaggctcatcgttcctattcaggcagatgttatcgaggtccgacnnnnnnaaaaactataaataaaaatacgaaaaagatcggatacgcatgaggct

SEQ ID NO: 7069 - DNA, 146 bp, Artificial Sequence
  Bisulfite Padlock Probe
  misc_feature 92, 93, 94, 95, 96, 97: n = A,T,C or G
gactggaagagcactgtttttacgaaacgtaaacaacgccaccgttggaggctcatcgttcctattcaggcagatgttatcgaggtccgacnnnnnnaaaaattcttaccacccatccacaaaatagatcggatacgcatgaggct

SEQ ID NO: 7070 - DNA, 146 bp, Artificial Sequence
  Bisulfite Padlock Probe
  misc_feature 92, 93, 94, 95, 96, 97: n = A,T,C or G
gactggaagagcactgtttttacgaaacgtaaacaacgccgccgttggaggctcatcgttcctattcaggcagatgttatcgaggtccgacnnnnnnaaaaattcttaccacccatccacgaaatagatcggatacgcatgaggct

SEQ ID NO: 7071 - DNA, 146 bp, Artificial Sequence
  Bisulfite Padlock Probe
  misc_feature 95, 96, 97, 98, 99, 100: n = A,T,C or G
gactggaagagcactgtttttacttcgaacccgcgaccactataacgttggaggctcatcgttcctattcaggcagatgttatcgaggtccgacnnnnnnctattcccctacgcactacaaaatccgatcggatacgcatgaggct

SEQ ID NO: 7072 - DNA, 146 bp, Artificial Sequence
  Bisulfite Padlock Probe
  misc_feature 95, 96, 97, 98, 99, 100: n = A,T,C or G
gactggaagagcactgtttttacttcgaacccgcgaccgctataacgttggaggctcatcgttcctattcaggcagatgttatcgaggtccgacnnnnnnctattcccctacgcgctacaaaatccgatcggatacgcatgaggct

SEQ ID NO: 7073 - DNA, 146 bp, Artificial Sequence
  Bisulfite Padlock Probe
  misc_feature 96, 97, 98, 99, 100, 101: n = A,T,C or G
gactggaagagcactgtttttacttttccaaaccccactctaccctcgttggaggctcatcgttcctattcaggcagatgttatcgaggtccgacnnnnnntaccaatacaacaactaaccaccccgatcggatacgcatgaggct

SEQ ID NO: 7074 - DNA, 146 bp, Artificial Sequence
  Bisulfite Padlock Probe
  misc_feature 96, 97, 98, 99, 100, 101: n = A,T,C or G
gactggaagagcactgtttttacttttccgaaccccactctaccctcgttggaggctcatcgttcctattcaggcagatgttatcgaggtccgacnnnnnntaccaatacaacaactaaccgccccgatcggatacgcatgaggct

SEQ ID NO: 7075 - DNA, 146 bp, Artificial Sequence
  Bisulfite Padlock Probe
  misc_feature 92, 93, 94, 95, 96, 97: n = A,T,C or G
gactggaagagcactgtttttataacctaaacctatccaaaaagttggaggctcatcgttcctattcaggcagatgttatcgaggtccgacnnnnnnatcatccaaacctactacccatccccaatgatcggatacgcatgaggct

SEQ ID NO: 7076 - DNA, 146 bp, Artificial Sequence
  Bisulfite Padlock Probe
  misc_feature 92, 93, 94, 95, 96, 97: n = A,T,C or G
gactggaagagcactgtttttataacctaaacctatccaaaaagttggaggctcatcgttcctattcaggcagatgttatcgaggtccgacnnnnnnatcatccaaacctactacccgtccccaatgatcggatacgcatgaggct

SEQ ID NO: 7077 - DNA, 146 bp, Artificial Sequence
  Bisulfite Padlock Probe
  misc_feature 93, 94, 95, 96, 97, 98: n = A,T,C or G
gactggaagagcactgtttttatacgcgaaactcgcgctcaaatgttggaggctcatcgttcctattcaggcagatgttatcgaggtccgacnnnnnncaacccgactccaactattacgcaaaacgatcggatacgcatgaggct

SEQ ID NO: 7078 - DNA, 146 bp, Artificial Sequence
  Bisulfite Padlock Probe
  misc_feature 93, 94, 95, 96, 97, 98: n = A,T,C or G
gactggaagagcactgtttttatacgcgaaactcgcgctcgaatgttggaggctcatcgttcctattcaggcagatgttatcgaggtccgacnnnnnncaacccgactccaactattacgcgaaacgatcggatacgcatgaggct

SEQ ID NO: 7079 - DNA, 146 bp, Artificial Sequence
  Bisulfite Padlock Probe
  misc_feature 92, 93, 94, 95, 96, 97: n = A,T,C or G
gactggaagagcactgtttttatccgccgccatcacctaactcgttggaggctcatcgttcctattcaggcagatgttatcgaggtccgacnnnnnncccaacgaaaaaccactaactaaataaatgatcggatacgcatgaggct

SEQ ID NO: 7080 - DNA, 146 bp, Artificial Sequence
  Bisulfite Padlock Probe
  misc_feature 92, 93, 94, 95, 96, 97: n = A,T,C or G
gactggaagagcactgtttttatccgccgccgtcacctaactcgttggaggctcatcgttcctattcaggcagatgttatcgaggtccgacnnnnnncccaacgaaaaaccgctaactaaataaatgatcggatacgcatgaggct

SEQ ID NO: 7081 - DNA, 146 bp, Artificial Sequence
  Bisulfite Padlock Probe
  misc_feature 94, 95, 96, 97, 98, 99: n = A,T,C or G
gactggaagagcactgtttttattataaaacctcgaccacctaacgttggaggctcatcgttcctattcaggcagatgttatcgaggtccgacnnnnnnatttcactattacgaaaaacgcaaaacgatcggatacgcatgaggct

SEQ ID NO: 7082 - DNA, 146 bp, Artificial Sequence
  Bisulfite Padlock Probe
  misc_feature 94, 95, 96, 97, 98, 99: n = A,T,C or G
gactggaagagcactgtttttattataaaacctcgaccgcctaacgttggaggctcatcgttcctattcaggcagatgttatcgaggtccgacnnnnnnatttcactattacgaaaaacgcgaaacgatcggatacgcatgaggct

SEQ ID NO: 7083 - DNA, 146 bp, Artificial Sequence
  Bisulfite Padlock Probe
  misc_feature 92, 93, 94, 95, 96, 97: n = A,T,C or G
gactggaagagcactgtttttattcaaaacacacatatactccgttggaggctcatcgttcctattcaggcagatgttatcgaggtccgacnnnnnnctatacatctctccccgacaaccaatccagatcggatacgcatgaggct

SEQ ID NO: 7084 - DNA, 146 bp, Artificial Sequence
  Bisulfite Padlock Probe
  misc_feature 92, 93, 94, 95, 96, 97: n = A,T,C or G
gactggaagagcactgtttttattcaaaacacacgtatactccgttggaggctcatcgttcctattcaggcagatgttatcgaggtccgacnnnnnnctatacatctctccccgacgaccaatccagatcggatacgcatgaggct

SEQ ID NO: 7085 - DNA, 146 bp, Artificial Sequence
  Bisulfite Padlock Probe
  misc_feature 96, 97, 98, 99, 100, 101: n = A,T,C or G
gactggaagagcactgtttttcaaaaattacaccccaaaacccaaaagttggaggctcatcgttcctattcaggcagatgttatcgaggtccgacnnnnnnaaaccacgacccaaaaccttaaaccgatcggatacgcatgaggct

SEQ ID NO: 7086 - DNA, 146 bp, Artificial Sequence
  Bisulfite Padlock Probe
  misc_feature 96, 97, 98, 99, 100, 101: n = A,T,C or G
gactggaagagcactgtttttcaaaaattacaccccaaaacccaaaagttggaggctcatcgttcctattcaggcagatgttatcgaggtccgacnnnnnnaaaccacgacccgaaaccttaaaccgatcggatacgcatgaggct

SEQ ID NO: 7087 - DNA, 146 bp, Artificial Sequence
  Bisulfite Padlock Probe
  misc_feature 93, 94, 95, 96, 97, 98: n = A,T,C or G
gactggaagagcactgtttttccacttacccactcaaccaccccgttggaggctcatcgttcctattcaggcagatgttatcgaggtccgacnnnnnnaaaaataaataaaacaatccaacaaaacgatcggatacgcatgaggct

SEQ ID NO: 7088 - DNA, 146 bp, Artificial Sequence
  Bisulfite Padlock Probe
  misc_feature 93, 94, 95, 96, 97, 98: n = A,T,C or G
gactggaagagcactgtttttccacttacccactcaaccaccccgttggaggctcatcgttcctattcaggcagatgttatcgaggtccgacnnnnnnaaaaataaataaaacgatccaacaaaacgatcggatacgcatgaggct

SEQ ID NO: 7089 - DNA, 146 bp, Artificial Sequence
  Bisulfite Padlock Probe
  misc_feature 94, 95, 96, 97, 98, 99: n = A,T,C or G
gactggaagagcactgtttttctacgtttcccccgcattaccaacgttggaggctcatcgttcctattcaggcagatgttatcgaggtccgacnnnnnnaaactactacttacccgcaatcaccccgatcggatacgcatgaggct

SEQ ID NO: 7090 - DNA, 146 bp, Artificial Sequence
  Bisulfite Padlock Probe
  misc_feature 94, 95, 96, 97, 98, 99: n = A,T,C or G
gactggaagagcactgtttttctacgtttcccccgcgttaccaacgttggaggctcatcgttcctattcaggcagatgttatcgaggtccgacnnnnnnaaactactacttacccgcgatcaccccgatcggatacgcatgaggct

SEQ ID NO: 7091 - DNA, 146 bp, Artificial Sequence
  Bisulfite Padlock Probe
  misc_feature 93, 94, 95, 96, 97, 98: n = A,T,C or G
gactggaagagcactgtttttctatcttttcctatacaaaaaccgttggaggctcatcgttcctattcaggcagatgttatcgaggtccgacnnnnnnaacgcgaaatctctaaataaacaccttcgatcggatacgcatgaggct

SEQ ID NO: 7092 - DNA, 146 bp, Artificial Sequence
  Bisulfite Padlock Probe
  misc_feature 93, 94, 95, 96, 97, 98: n = A,T,C or G
gactggaagagcactgtttttctatcttttcctatacaaaaaccgttggaggctcatcgttcctattcaggcagatgttatcgaggtccgacnnnnnnaacgcgaaatctctaaataaacgccttcgatcggatacgcatgaggct

SEQ ID NO: 7093 - DNA, 146 bp, Artificial Sequence
  Bisulfite Padlock Probe
  misc_feature 96, 97, 98, 99, 100, 101: n = A,T,C or G
gactggaagagcactgtttttcttattaaaaatcacctaaataaaaagttggaggctcatcgttcctattcaggcagatgttatcgaggtccgacnnnnnntccgccccacaactattctaataccgatcggatacgcatgaggct

SEQ ID NO: 7094 - DNA, 146 bp, Artificial Sequence
  Bisulfite Padlock Probe
  misc_feature 96, 97, 98, 99, 100, 101: n = A,T,C or G
gactggaagagcactgtttttcttattaaaaatcgcctaaataaaaagttggaggctcatcgttcctattcaggcagatgttatcgaggtccgacnnnnnntccgccccgcaactattctaataccgatcggatacgcatgaggct

SEQ ID NO: 7095 - DNA, 146 bp, Artificial Sequence
  Bisulfite Padlock Probe
  misc_feature 93, 94, 95, 96, 97, 98: n = A,T,C or G
gactggaagagcactgttttttcccctctaatatcactaacaaagttggaggctcatcgttcctattcaggcagatgttatcgaggtccgacnnnnnnaacctctcactaccccacactccacatcgatcggatacgcatgaggct

SEQ ID NO: 7096 - DNA, 146 bp, Artificial Sequence
  Bisulfite Padlock Probe
  misc_feature 93, 94, 95, 96, 97, 98: n = A,T,C or G
gactggaagagcactgttttttcccgatacttcccgcaaaacccgttggaggctcatcgttcctattcaggcagatgttatcgaggtccgacnnnnnnactcgtaaacctatacccaaacactaccgatcggatacgcatgaggct

SEQ ID NO: 7097 - DNA, 146 bp, Artificial Sequence
  Bisulfite Padlock Probe
  misc_feature 93, 94, 95, 96, 97, 98: n = A,T,C or G
gactggaagagcactgttttttcccgatacttcccgcgaaacccgttggaggctcatcgttcctattcaggcagatgttatcgaggtccgacnnnnnnactcgtaaacctatacccaaacgctaccgatcggatacgcatgaggct

SEQ ID NO: 7098 - DNA, 146 bp, Artificial Sequence
  Bisulfite Padlock Probe
  misc_feature 96, 97, 98, 99, 100, 101: n = A,T,C or G
gactggaagagcactgttttttctccaacgcaaaaatctactaacccgttggaggctcatcgttcctattcaggcagatgttatcgaggtccgacnnnnnnaaataaacgaaacgatcaaacaaccgatcggatacgcatgaggct

SEQ ID NO: 7099 - DNA, 146 bp, Artificial Sequence
  Bisulfite Padlock Probe
  misc_feature 96, 97, 98, 99, 100, 101: n = A,T,C or G
gactggaagagcactgttttttctccaacgcgaaaatctactaacccgttggaggctcatcgttcctattcaggcagatgttatcgaggtccgacnnnnnnaaataaacgaaacgatcaaacgaccgatcggatacgcatgaggct

SEQ ID NO: 7100 - DNA, 146 bp, Artificial Sequence
  Bisulfite Padlock Probe
  misc_feature 95, 96, 97, 98, 99, 100: n = A,T,C or G
gactggaagagcactgtttttttactttaatatcaataatataaatgttggaggctcatcgttcctattcaggcagatgttatcgaggtccgacnnnnnncgaaacaaaacgaaaacacaaaccacgatcggatacgcatgaggct

SEQ ID NO: 7101 - DNA, 146 bp, Artificial Sequence
  Bisulfite Padlock Probe
  misc_feature 95, 96, 97, 98, 99, 100: n = A,T,C or G
gactggaagagcactgtttttttactttaatatcgataatataaatgttggaggctcatcgttcctattcaggcagatgttatcgaggtccgacnnnnnncgaaacaaaacgaaaacgcaaaccacgatcggatacgcatgaggct

SEQ ID NO: 7102 - DNA, 146 bp, Artificial Sequence
  Bisulfite Padlock Probe
  misc_feature 95, 96, 97, 98, 99, 100: n = A,T,C or G
gactggaagagcactgtttttttccaataaaatattttataacacagttggaggctcatcgttcctattcaggcagatgttatcgaggtccgacnnnnnntctaaaacctaccctcccgaccaaaagatcggatacgcatgaggct

SEQ ID NO: 7103 - DNA, 146 bp, Artificial Sequence
  Bisulfite Padlock Probe
  misc_feature 95, 96, 97, 98, 99, 100: n = A,T,C or G
gactggaagagcactgtttttttccaataaaatattttataacacagttggaggctcatcgttcctattcaggcagatgttatcgaggtccgacnnnnnntctaaaacctaccctcccgaccgaaagatcggatacgcatgaggct

SEQ ID NO: 7104 - DNA, 146 bp, Artificial Sequence
  Bisulfite Padlock Probe
  misc_feature 92, 93, 94, 95, 96, 97: n = A,T,C or G
gactggaagagcactgtttttttccattctttttcttacctacgttggaggctcatcgttcctattcaggcagatgttatcgaggtccgacnnnnnnaaaaataccaccactaaactaacacaacagatcggatacgcatgaggct

SEQ ID NO: 7105 - DNA, 146 bp, Artificial Sequence
  Bisulfite Padlock Probe
  misc_feature 92, 93, 94, 95, 96, 97: n = A,T,C or G
gactggaagagcactgtttttttccattctttttcttacctacgttggaggctcatcgttcctattcaggcagatgttatcgaggtccgacnnnnnnaaaaataccaccactaaactaacgcaacagatcggatacgcatgaggct

SEQ ID NO: 7106 - DNA, 146 bp, Artificial Sequence
  Bisulfite Padlock Probe
  misc_feature 94, 95, 96, 97, 98, 99: n = A,T,C or G
gactggaagagcactgtttttttcccttcctctaatactcaacacgttggaggctcatcgttcctattcaggcagatgttatcgaggtccgacnnnnnnctcaaaaattaaaaatcaaccctccccgatcggatacgcatgaggct

SEQ ID NO: 7107 - DNA, 146 bp, Artificial Sequence
  Bisulfite Padlock Probe
  misc_feature 94, 95, 96, 97, 98, 99: n = A,T,C or G
gactggaagagcactgtttttttcccttcctctaatactcgacacgttggaggctcatcgttcctattcaggcagatgttatcgaggtccgacnnnnnnctcaaaaattaaaaatcaaccctccccgatcggatacgcatgaggct

SEQ ID NO: 7108 - DNA, 146 bp, Artificial Sequence
  Bisulfite Padlock Probe
  misc_feature 94, 95, 96, 97, 98, 99: n = A,T,C or G
gactggaagagcactgtttttttctttctaaaacaaaatctctatgttggaggctcatcgttcctattcaggcagatgttatcgaggtccgacnnnnnnaaaacgacgaaacgtttccaaaaatccgatcggatacgcatgaggct

SEQ ID NO: 7109 - DNA, 146 bp, Artificial Sequence
  Bisulfite Padlock Probe
  misc_feature 94, 95, 96, 97, 98, 99: n = A,T,C or G
gactggaagagcactgtttttttctttctaaaacgaaatctctatgttggaggctcatcgttcctattcaggcagatgttatcgaggtccgacnnnnnnaaaacgacgaaacgtttccgaaaatccgatcggatacgcatgaggct
